(19) United States
(12) Patent Application Publication
(10) Pub. No.: US 2025/0019698 A1
(43) Pub. Date: Jan. 16, 2025

(54) IRNA COMPOSITIONS AND METHODS FOR SILENCING COMPLEMENT COMPONENT 3 (C3)

(71) Applicant: Alnylam Pharmaceuticals, Inc., Cambridge, MA (US)

(72) Inventor: Joseph Barry, Arlington, MA (US)

(21) Appl. No.: 18/605,975

(22) Filed: Mar. 15, 2024

Related U.S. Application Data
(63) Continuation of application No. PCT/US2022/076464, filed on Sep. 15, 2022.
(60) Provisional application No. 63/245,260, filed on Sep. 17, 2021.

(51) Int. Cl. C12N 15/113

(52) U.S. Cl. CPC C12N 15/113; C12N 2310/14; C12N 2310/3125; C12N 2310/315; C12N 2310/321; C12N 2310/322; C12N 2310/3231; C12N 2310/351

(57) ABSTRACT

The present invention relates to RNAi agents, e.g., double stranded RNA (dsRNA) agents, targeting a complement component C3 (C3) gene. The invention also relates to methods of using such RNAi agents to inhibit expression of a C3 gene and to methods of preventing and treating a C3-associated disorder, e.g., paroxysmal nocturnal hemoglobinuria (PNH), atypical hemolytic uremic syndrome (aHUS), atypical hemolytic uremic syndrome (aHUS), neuromyelitis optica (NMO), multifocal motor neuropathy (MMN), myasthenia gravis (MG), C3 glomerulonephritis, or systemic lupus erythmatosis.

### RELATED APPLICATIONS

[0001] This application is a 35 § U.S.C. 111 (a) continuation application which claims the benefit of priority to International Application No. PCT/US2022/076464, filed on Sep. 15, 2022, which, in turn, claims the benefit of priority to U.S. Provisional Application No. 63/245,260, filed on Sep. 17, 2021, the entire contents of each of which are incorporated herein by reference.

### SEQUENCE LISTING

[0002] The instant application contains a Sequence Listing which has been submitted electronically in XML file format via Patent Center and is hereby incorporated by reference in its entirety. Said XML copy, created on Mar. 6, 2024, is named 121301_16802_SL.xml and is 5,484,861 bytes in size.

### BACKGROUND OF THE INVENTION

[0003] The complement system consists of more than 30 proteins that are either present as soluble proteins in the blood or are present as membrane-associated proteins. Activation of complement leads to a sequential cascade of enzymatic reactions, known as complement activation pathways resulting in the formation of the potent anaphylatoxins C3a and C5a. Initially, complement was thought to play a major role in innate immunity where a robust and rapid response is mounted against invading pathogens. However, recently it is becoming increasingly evident that complement also plays an important role in adaptive immunity involving T and B cells that help in elimination of pathogens (Dunkelberger JR and Song WC. (2010) Cell Res. 20:34; Molina H, et al. (1996) Proc Natl Acad Sci USA. 93:3357), in maintaining immunologic memory preventing pathogenic re-invasion, and is involved in numerous human pathological states (Qu, H, et al. (2009) Mol Immunol. 47:185; Wagner, E. and Frank MM. (2010) Nat Rev Drug Discov. 9:43).

[0004] Complement activation is known to occur through three different pathways: alternate, classical and lectin (FIG. 1) involving proteins that mostly exist as inactive zymogens that are then sequentially cleaved and activated.

[0005] The classical pathway is often activated by antibody-antigen complexes or by the C-reactive protein (CRP), both of which interact with complement component C1q. In addition, the classical pathway can be activated by phosphatidyl serine present in apoptotic bodies in the absence of immune complexes.

[0006] The lectin pathway is initiated by the mannose-binding lectins (MBL) that bind to complex carbohydrate residues on the surface of pathogens. The activation of the classical pathway or the lectin pathway leads to activation of the (C4b2b) C3 convertase.

[0007] The alternate pathway is activated by the binding of C3b, which is spontaneously generated by the hydrolysis of C3, on targeted surfaces. This surface-bound C3b is then recognized by factor B.

[0008] forming the complex C3bB. The C3bB complex, in turn, is cleaved by factor D to yield the active form of the C3 convertase of the AP (C3bBb). Both types of C3 convertases will cleave C3, forming C3b. C3b then either binds to more factor B, enhancing the complement activation through the AP (the so-called alternative or amplification loop), or leads to the formation of the active C5 convertase (C3bBbC3b or C4bC2bC3b), which cleaves C5 and triggers the late events that result in the formation of the membrane attack complex (MAC) (C5b-9).

[0009] Inappropriate activation of the complement system is responsible for propagating and/or initiating pathology in many different diseases, including, for example, paroxysmal nocturnal hemoglobinuria (PNH), atypical hemolytic uremic syndrome (aHUS), neuromyelitis optica (NMO), multifocal motor neuropathy (MMN), myasthenia gravis (MG), C3 glomerulonephritis, systemic lupus erythmatosis, rheumatoid arthritis, ischemia-reperfusion injuries and neurodegenerative diseases.

[0010] To date, only one therapeutic that targets the C5-C5a axis is available for the treatment of complement component C3-associated diseases, the anti-C5 antibody, eculizumab (Soliris®). Although eculizumab has been shown to be effective for the treatment of paroxysmal nocturnal hemoglobinuria (PNH) and atypical hemolytic uremic syndrome (aHUS) and is currently being evaluated in clinical trials for additional complement component C3-associated diseases, eculizumab therapy requires weekly high dose infusions followed by biweekly maintenance infusions at a high cost. Furthermore, approximately 50% of eculizumab-treated PNH subjects have low level of hemolysis and require residual transfusions (Hill A, et al. (2010) Haematologica 95 (4): 567-73).

[0011] Accordingly, there is a need in the art for alternative therapies and combination therapies for subjects having a complement component C3-associated disease.

### SUMMARY OF THE INVENTION

[0012] The present invention provides iRNA compositions which effect the RNA-induced silencing complex (RISC)-mediated cleavage of RNA transcripts of a gene encoding complement component C3 (C3). The C3 gene may be within a cell, e.g., a cell within a subject, such as a human subject. The present invention also provides methods of using the iRNA compositions of the invention for inhibiting the expression of a C3 gene and/or for treating a subject who would benefit from inhibiting or reducing the expression of a C3 gene, e.g., a subject suffering or prone to suffering from a C3-associated disorder, e.g., paroxysmal nocturnal hemoglobinuria (PNH), atypical hemolytic uremic syndrome (aHUS), atypical hemolytic uremic syndrome (aHUS), neuromyelitis optica (NMO), multifocal motor neuropathy (MMN), myasthenia gravis (MG), C3 glomerulonephritis, or systemic lupus erythmatosis.

[0013] Accordingly, in an aspect, the invention provides a double stranded ribonucleic acid (dsRNA) agent for inhibiting expression of complement component C3 (C3) in a cell, wherein the dsRNA agent comprises a sense strand and an antisense strand forming a double stranded region, wherein the sense strand comprises at least 15, e.g., 15, 16, 17, 18, 19, or 20, contiguous nucleotides differing by no more than 0, 1, 2, or 3 nucleotides from the nucleotide sequence of SEQ ID NO:901 and the antisense strand comprises at least 15, e.g., 15, 16, 17, 18, 19, or 20, contiguous nucleotides differing by no more than 1, 2, or 3 nucleotides from the corresponding portion of the nucleotide sequence of SEQ ID NO:902.

[0014] In another aspect, the present invention provides a double stranded ribonucleic acid (dsRNA) for inhibiting expression of complement component C3 (C3) in a cell, wherein said dsRNA comprises a sense strand and an antisense strand forming a double stranded region, wherein the antisense strand comprises a region of complementarity to an mRNA encoding C3, and wherein the region of complementarity comprises at least 15, e.g., 15, 16, 17, 18, 19, or 20, contiguous nucleotides differing by no more than 0, 1, 2, or 3 nucleotides from any one of the antisense nucleotide sequences in any one of Tables 2-5.

[0015] In another aspect, the present invention provides a double stranded ribonucleic acid (dsRNA) agent for inhibiting expression of complement component C3 (C3) in a cell, wherein the dsRNA agent comprises a sense strand and an antisense strand forming a double stranded region, wherein the sense strand comprises at least 15, e.g., 15, 16, 17, 18, 19, or 20, contiguous nucleotides differing by no more than three nucleotides from any one of the nucleotide sequence of nucleotides 809-831, 810-832, 811-831, 812-832, 2632-2654, 2633-2655, 2634-2654, 2634-2656, or 2635-2655 of SEQ ID NO: 901, and the antisense strand comprises at least 15 contiguous nucleotides from the corresponding nucleotide sequence of SEQ ID NO:902.

[0016] In one aspect, the present invention provides a double stranded ribonucleic acid (dsRNA) agent for inhibiting expression of complement component C3 (C3) in a cell, wherein the dsRNA agent comprises a sense strand and an antisense strand forming a double stranded region, wherein the sense strand comprises at least 15, e.g., 15, 16, 17, 18, 19, or 20, contiguous nucleotides differing by no more than three nucleotides from any one of the nucleotide sequence of nucleotides 809-831, 2632-2654, 2633-2655, or 2634-2656 of SEQ ID NO: 901, and the antisense strand comprises at least 15 contiguous nucleotides from the corresponding nucleotide sequence of SEQ ID NO:902.

[0017] In one embodiment, the antisense strand comprises at least 15, e.g., 15, 16, 17, 18, 19, or 20, contiguous nucleotides differing by no more than three nucleotides from any one of the antisense strand nucleotide sequences of a duplex selected from the group consisting of AD-569268.9, AD-1479342.2, AD-1479343.2, AD-1479344.2, AD-1479345.2, AD-1479346.2, AD-570712.6, AD-1479289.2, AD-570713.5, AD-570714.11. AD-1479311.2, AD-1479312.2, AD-1479317.2, and AD-1479328.2.

[0018] In one embodiment, the dsRNA agent comprises at least one modified nucleotide.

[0019] In one embodiment, substantially all of the nucleotides of the sense strand are modified nucleotides; substantially all of the nucleotides of the antisense strand are modified nucleotides; or substantially all of the nucleotides of the sense strand and substantially all of the nucleotides of the antisense strand are modified nucleotides.

[0020] In one embodiment, all of the nucleotides of the sense strand are modified nucleotides; all of the nucleotides of the antisense strand are modified nucleotides; or all of the nucleotides of the sense strand and all of the nucleotides of the antisense strand are modified nucleotides.

[0021] In one embodiment, at least one of the modified nucleotides is selected from the group consisting of a deoxy-nucleotide, a 3′-terminal deoxythimidine (dT) nucleotide, a 2′-O-methyl modified nucleotide, a 2′-fluoro modified nucleotide, a 2′-deoxy-modified nucleotide, a locked nucleotide, an unlocked nucleotide, a conformationally restricted nucleotide, a constrained ethyl nucleotide, an abasic nucleotide, a 2′-amino-modified nucleotide, a 2′-O-allyl-modified nucleotide, 2′-C-alkyl-modified nucleotide, 2′-hydroxly-modified nucleotide, a 2′-methoxyethyl modified nucleotide, a 2′-O-alkyl-modified nucleotide, a morpholino nucleotide, a phosphoramidate, a non-natural base comprising nucleotide, a tetrahydropyran modified nucleotide, a 1,5-anhydrohexitol modified nucleotide, a cyclohexenyl modified nucleotide, a nucleotide comprising a phosphorothioate group, a nucleotide comprising a methylphosphonate group, a vinyl phosphonate nucleotide, a nucleotide comprising a 5′-phosphate, a nucleotide comprising a 5′-phosphate mimic, a thermally destabilizing nucleotide, a glycol modified nucleotide (GNA), a nucleotide comprising a 2′ phosphate, and a 2-O—(N-methylacetamide) modified nucleotide; and combinations thereof.

[0022] In one embodiment, at least one of the modified nucleotides is selected from the group consisting of LNA, HNA, CeNA, 2′-methoxyethyl, 2′-O-alkyl, 2′-O-allyl, 2′-C-allyl, 2′-fluoro, 2′-deoxy, 2′-hydroxyl, and glycol; and combinations thereof.

[0023] In one embodiment, at least one of the modified nucleotides is selected from the group consisting of a deoxy-nucleotide, a 2′-O-methyl modified nucleotide, a 2′-fluoro modified nucleotide, a 2′-deoxy-modified nucleotide, a glycol modified nucleotide (GNA), e.g., Ggn, Cgn, Tgn, or Agn, a nucleotide with a 2′ phosphate, e.g., G2p, C2p, A2p or U2p, and a nucleotide comprising a phosphorothioate group, and combinations thereof.

[0024] In another embodiment, at least one of the modified nucleotides is a nucleotide with a thermally destabilizing nucleotide modification.

[0025] In one embodiment, the thermally destabilizing nucleotide modification is selected from the group consisting of an abasic modification; a mismatch with the opposing nucleotide in the duplex; a destabilizing sugar modification, a 2′-deoxy modification, an acyclic nucleotide, an unlocked nucleic acid (UNA), and a glycerol nucleic acid (GNA).

[0026] In some embodiments, the modified nucleotide comprises a short sequence of 3′-terminal deoxythimidine nucleotides (dT).

[0027] In some embodiments, the dsRNA agent further comprises at least one phosphorothioate internucleotide linkage. In some embodiments, the dsRNA agent comprises 6-8 phosphorothioate internucleotide linkages. In one embodiment, the phosphorothioate or methylphosphonate internucleotide linkage is at the 3′-terminus of one strand. Optionally, the strand is the antisense strand. In another embodiment, the strand is the sense strand. In a related embodiment, the phosphorothioate or methylphosphonate internucleotide linkage is at the 5′-terminus of one strand. Optionally, the strand is the antisense strand. In another embodiment, the strand is the sense strand. In another embodiment, the phosphorothioate or methylphosphonate internucleotide linkage is at the both the 5′- and 3′-terminus of one strand. Optionally, the strand is the antisense strand. In another embodiment, the strand is the sense strand.

[0028] The double stranded region may be 19-30 nucleotide pairs in length; 19-25 nucleotide pairs in length; 19-23 nucleotide pairs in length; 23-27 nucleotide pairs in length; or 21-23 nucleotide pairs in length.

[0029] In one embodiment, each strand is independently no more than 30 nucleotides in length.

[0030] In one embodiment, the sense strand is 21 nucleotides in length and the antisense strand is 23 nucleotides in length.

[0031] The region of complementarity may be at least 17 nucleotides in length; between 19 and 23 nucleotides in length; or 19 nucleotides in length.

[0032] In one embodiment, at least one strand comprises a 3′ overhang of at least 1 nucleotide. In another embodiment, at least one strand comprises a 3′ overhang of at least 2 nucleotides.

[0033] In one embodiment, the dsRNA agent further comprises a ligand.

[0034] In one embodiment, the ligand is conjugated to the 3′ end of the sense strand of the dsRNA agent.

[0035] In one embodiment, the ligand is an N-acetylgalactosamine (GalNAc) derivative.

[0036] In one embodiment, the ligand is one or more GalNAc derivatives attached through a monovalent, bivalent, or trivalent branched linker.

[0037] In one embodiment, the ligand is

[chemical structure]

[0038] In one embodiment, the dsRNA agent is conjugated to the ligand as shown in the following schematic

[chemical structure]

and, wherein X is O or S.

[0039] In one embodiment, the X is O.

[0040] In one embodiment, the dsRNA agent further comprises at least one phosphorothioate or methylphosphonate internucleotide linkage.

[0041] In one embodiment, the phosphorothioate or methylphosphonate internucleotide linkage is at the 3′-terminus of one strand, e.g., the antisense strand or the sense strand.

[0042] In another embodiment, the phosphorothioate or methylphosphonate internucleotide linkage is at the 5′-terminus of one strand, e.g., the antisense strand or the sense strand.

[0043] In one embodiment, the phosphorothioate or methylphosphonate internucleotide linkage is at the both the 5′- and 3′-terminus of one strand. In one embodiment, the strand is the antisense strand.

[0044] In one embodiment, the base pair at the 1 position of the 5′-end of the antisense strand of the duplex is an AU base pair.

[0045] The present invention also provides cells containing any of the dsRNA agents of the invention and pharmaceutical compositions comprising any of the dsRNA agents of the invention.

[0046] The pharmaceutical composition of the invention may include dsRNA agent in an unbuffered solution, e.g., saline or water, or the pharmaceutical composition of the invention may include the dsRNA agent is in a buffer solution, e.g., a buffer solution comprising acetate, citrate, prolamine, carbonate, or phosphate or any combination thereof; or phosphate buffered saline (PBS).

[0047] In one aspect, the present invention provides a method of inhibiting expression of a complement component C3 (C3) gene in a cell. The method includes contacting the cell with any of the dsRNAs of the invention or any of the pharmaceutical compositions of the invention, thereby inhibiting expression of the C3 gene in the cell.

[0048] In one embodiment, the cell is within a subject, e.g., a human subject, e.g., a subject having a complement component C3 (C3)-associated disorder, such as paroxysmal nocturnal hemoglobinuria (PNH), atypical hemolytic uremic syndrome (aHUS), atypical hemolytic uremic syndrome (aHUS), neuromyelitis optica (NMO), multifocal motor neuropathy (MMN), myasthenia gravis (MG), C3 glomerulonephritis, or systemic lupus erythmatosis.

[0049] In certain embodiments, contacting the cell with the dsRNA agent inhibits the expression of C3 by at least 50%, 60%, 70%, 80%, 90%, 95% (e.g., as compared to the level of expression of C3 prior to first contacting the cell with the dsRNA agent; e.g., prior to administration of a first dose of the dsRNA agent to the subject). In certain embodiments, inhibiting expression of C3 decreases a C3 protein level in a subject serum sample(s) by at least 50%, 60%, 70%, 80%, 90%, or 95%, e.g., as compared to the level of expression of C3 prior to first contacting the cell with the dsRNA agent.

[0050] In one aspect, the present invention provides a method of treating a subject having a disorder that would benefit from reduction in complement component C3 (C3) expression. The method includes administering to the subject a therapeutically effective amount of any of the dsRNAs of the invention or any of the pharmaceutical compositions of the invention, thereby treating the subject having the disorder that would benefit from reduction in C3 expression.

[0051] In another aspect, the present invention provides a method of preventing at least one symptom in a subject having a disorder that would benefit from reduction in complement component C3 (C3) expression. The method includes administering to the subject a prophylactically effective amount of any of the dsRNAs of the invention or any of the pharmaceutical compositions of the invention, thereby preventing at least one symptom in the subject having the disorder that would benefit from reduction in C3 expression.

[0052] In certain embodiments, the disorder is a complement component C3 (C3)-associated disorder.

[0053] In some embodiments, the C3-associated disorder is selected from the group consisting of paroxysmal nocturnal hemoglobinuria (PNH), atypical hemolytic uremic syndrome (aHUS), atypical hemolytic uremic syndrome (aHUS), neuromyelitis optica (NMO), multifocal motor neuropathy (MMN), myasthenia gravis (MG), C3 glomerulonephritis, and systemic lupus erythmatosis.

[0054] In a further aspect, the present invention also provides methods of inhibiting the expression of complement component C3 (C3) in a subject. The methods include administering to the subject a therapeutically effective amount of any of the dsRNAs provided herein, thereby inhibiting the expression of C3 in the subject.

[0055] In one embodiment, the subject is human.

[0056] In one embodiment, administration of the dsRNA agent to the subject causes a decrease in hemolysis and/or a decrease in C3 protein accumulation in the subject.

[0057] In one embodiment, the dsRNA agent is administered to the subject at a dose of about 0.01 mg/kg to about 50 mg/kg.

[0058] In one embodiment, the dsRNA agent is administered to the subject subcutaneously.

[0059] In one embodiment, the dsRNA agent is administered to the subject intravenously.

[0060] In one embodiment, the methods of the invention further include determining the level of C3 in the subject sample(s) is a C3 protein level in a blood or a serum or a urine or a liver tissue sample(s).

[0061] In certain embodiments, the methods of the invention further comprise administering to the subject an additional therapeutic agent.

[0062] In certain embodiments, the additional therapeutic agent is eculizumab. In certain embodiments, the additional therapeutic agent is compstatin.

[0063] The present invention also provides kits comprising any of the dsRNAs of the invention or any of the pharmaceutical compositions of the invention, and optionally, instructions for use. In one embodiment, the invention provides a kit for performing a method of inhibiting expression of a C3 gene in a cell by contacting a cell with a double stranded RNAi agent of the invention in an amount effective to inhibit expression of the C3 in the cell. The kit comprises an RNAi agent and instructions for use and, optionally, means for administering the RNAi agent to a subject.

[0064] The present invention also provides vials comprising the dsRNA agent of the invention or the pharmaceutical composition of the invention. The present invention further provides syringes comprising the dsRNA agent of the invention or the pharmaceutical composition of the invention.

[0065] The present invention further provides an RNA-induced silencing complex (RISC) comprising an antisense strand of any of the dsRNA agents of the invention.

[0066] In another embodiment, the RNAi agent is a pharmaceutically acceptable salt thereof. “Pharmaceutically acceptable salts” of each of RNAi agents herein include, but are not limited to, a sodium salt, a calcium salt, a lithium salt, a potassium salt, an ammonium salt, a magnesium salt, an mixtures thereof. One skilled in the art will appreciate that the RNAi agent, when provided as a polycationic salt having one cation per free acid group of the optionally modified phosophodiester backbone and/or any other acidic modifications (e.g., 5′-terminal phosphonate groups). For example, an oligonucleotide of “n” nucleotides in length contains n−1 optionally modified phosophodiesters, so that an oligonucleotide of 21 nt in length may be provided as a salt having up to 20 cations (e.g. 20 sodium cations). Similarly, an RNAi agentshaving a sense strand of 21 nt in length and an antisense strand of 23 nt in length may be provided as a salt having up to 42 cations (e.g, 42 sodium cations). In the preceding example, where the RNAi agent also includes a 5′-terminal phosphate or a 5′-terminal vinylphosphonate group, the RNAi agent may be provided as a salt having up to 44 cations (e.g, 44 sodium cations).

### BRIEF DESCRIPTION OF THE DRAWINGS

[0067] FIG. 1 is a schematic of the three complement pathways: alternative, classical and lectin.

[0068] FIG. 2 is a graph showing human C3 mRNA levels in mice (n=3 per group) subcutaneously administered a single 10 mg/kg dose of the indicated dsRNA duplexes on day 14 post-dose. Human C3 mRNA levels are shown relative to control levels detected with PBS treatment.

### DETAILED DESCRIPTION OF THE INVENTION

[0069] The present invention provides iRNA compositions which effect the RNA-induced silencing complex (RISC)-mediated cleavage of RNA transcripts of a complement component C3 (C3) gene. The gene may be within a cell, e.g., a cell within a subject, such as a human. The use of these iRNAs enables the targeted degradation of mRNAs of the corresponding gene (C3) in mammals.

[0070] The iRNAs of the invention have been designed to target the huma complement component C3 (C3) gene, including portions of the gene that are conserved in the C3 orthologs of other mammalian species. Without intending to be limited by theory, it is believed that a combination or sub-combination of the foregoing properties and the specific target sites or the specific modifications in these iRNAs confer to the iRNAs of the invention improved efficacy, stability, potency, durability, and safety.

[0071] Accordingly, the present invention provides methods for treating and preventing a complement component C3 (C3)-associated disorder, e.g., paroxysmal nocturnal hemoglobinuria (PNH), atypical hemolytic uremic syndrome (aHUS), atypical hemolytic uremic syndrome (aHUS), neuromyelitis optica (NMO), multifocal motor neuropathy (MMN), myasthenia gravis (MG), C3 glomerulonephritis, or systemic lupus erythmatosis, using iRNA compositions which effect the RNA-induced silencing complex (RISC)-mediated cleavage of RNA transcripts of a C3 gene.

[0072] The iRNAs of the invention include an RNA strand (the antisense strand) having a region which is up to about 30 nucleotides or less in length, e.g., 19-30, 19-29, 19-28, 19-27, 19-26, 19-25, 19-24, 19-23, 19-22, 19-21, 19-20, 20-30, 20-29, 20-28, 20-27, 20-26, 20-25, 20-24,20-23, 20-22, 20-21, 21-30, 21-29, 21-28, 21-27, 21-26, 21-25, 21-24, 21-23, or 21-22 nucleotides in length, which region is substantially complementary to at least part of an mRNA transcript of a C3 gene.

[0073] In certain embodiments, one or both of the strands of the double stranded RNAi agents of the invention is up to 66 nucleotides in length, e.g., 36-66, 26-36, 25-36, 31-60, 22-43, 27-53 nucleotides in length, with a region of at least 19 contiguous nucleotides that is substantially complementary to at least a part of an mRNA transcript of a C3 gene. In some embodiments, such iRNA agents having longer length antisense strands may, for example, include a second RNA strand (the sense strand) of 20-60 nucleotides in length wherein the sense and antisense strands form a duplex of 18-30 contiguous nucleotides.

[0074] The use of iRNAs of the invention enables the targeted degradation of mRNAs of the corresponding gene (C3 gene) in mammals. Using in vitro assays, the present inventors have demonstrated that iRNAs targeting a C3 gene can potently mediate RNAi, resulting in significant inhibition of expression of a C3 gene. Thus, methods and compositions including these iRNAs are useful for treating a subject having a C3-associated disorder, e.g., paroxysmal nocturnal hemoglobinuria (PNH), atypical hemolytic uremic syndrome (aHUS), atypical hemolytic uremic syndrome (aHUS), neuromyelitis optica (NMO), multifocal motor neuropathy (MMN), myasthenia gravis (MG), C3 glomerulonephritis, or systemic lupus erythmatosis.

[0075] Accordingly, the present invention provides methods and combination therapies for treating a subject having a disorder that would benefit from inhibiting or reducing the expression of a C3 gene, e.g., a complement component C3 (C3)-associated disorder, such as paroxysmal nocturnal hemoglobinuria (PNH), atypical hemolytic uremic syndrome (aHUS), atypical hemolytic uremic syndrome (aHUS), neuromyelitis optica (NMO), multifocal motor neuropathy (MMN), myasthenia gravis (MG), C3 glomerulonephritis, or systemic lupus erythmatosis, using iRNA compositions which effect the RNA-induced silencing complex (RISC)-mediated cleavage of RNA transcripts of a C3 gene.

[0076] The present invention also provides methods for preventing at least one symptom in a subject having a disorder that would benefit from inhibiting or reducing the expression of a C3 gene. e.g., a complement component C3 (C3)-associated disorder, such as paroxysmal nocturnal hemoglobinuria (PNH), atypical hemolytic uremic syndrome (aHUS), atypical hemolytic uremic syndrome (aHUS), neuromyelitis optica (NMO), multifocal motor neuropathy (MMN), myasthenia gravis (MG), C3 glomerulonephritis, or systemic lupus erythmatosis.

[0077] The following detailed description discloses how to make and use compositions containing iRNAs to inhibit the expression of a C3 gene as well as compositions, uses, and methods for treating subjects that would benefit from inhibition and/or reduction of the expression of a C3 gene, e.g., subjects susceptible to or diagnosed with a C3-associated disorder.

### I. Definitions

[0078] In order that the present invention may be more readily understood, certain terms are first defined. In addition, it should be noted that whenever a value or range of values of a parameter are recited, it is intended that values and ranges intermediate to the recited values are also intended to be part of this invention.

[0079] The articles “a” and “an” are used herein to refer to one or to more than one (i.e., to at least one) of the grammatical object of the article. By way of example, “an element” means one element or more than one element, e.g., a plurality of elements.

[0080] The term “including” is used herein to mean, and is used interchangeably with, the phrase “including but not limited to”.

[0081] The term “or” is used herein to mean, and is used interchangeably with, the term “and/or,” unless context clearly indicates otherwise. For example, “sense strand or antisense strand” is understood as “sense strand or antisense strand or sense strand and antisense strand.”

[0082] The term “about” is used herein to mean within the typical ranges of tolerances in the art. For example, “about” can be understood as about 2 standard deviations from the mean. In certain embodiments, about means±10%. In certain embodiments, about means±5%. When about is present before a series of numbers or a range, it is understood that “about” can modify each of the numbers in the series or range.

[0083] The term “at least”, “no less than”, or “or more” prior to a number or series of numbers is understood to include the number adjacent to the term “at least”, and all subsequent numbers or integers that could logically be included, as clear from context. For example, the number of nucleotides in a nucleic acid molecule must be an integer. For example, “at least 19 nucleotides of a 21 nucleotide nucleic acid molecule” means that 19, 20, or 21 nucleotides have the indicated property. When at least is present before a series of numbers or a range, it is understood that “at least” can modify each of the numbers in the series or range.

[0084] As used herein, “no more than” or “or less” is understood as the value adjacent to the phrase and logical lower values or integers, as logical from context, to zero. For example, a duplex with an overhang of “no more than 2 nucleotides” has a 2, 1, or 0 nucleotide overhang. When “no more than” is present before a series of numbers or a range, it is understood that “no more than” can modify each of the numbers in the series or range. As used herein, ranges include both the upper and lower limit.

[0085] As used herein, methods of detection can include determination that the amount of analyte present is below the level of detection of the method.

[0086] In the event of a conflict between an indicated target site and the nucleotide sequence for a sense or antisense strand, the indicated sequence takes precedence.

[0087] In the event of a conflict between a sequence and its indicated site on a transcript or other sequence, the nucleotide sequence recited in the specification takes precedence.

[0088] As used herein, the term “Complement Component 3,” used interchangeably with the term “C3,” refers to the well-known gene and polypeptide, also known in the art as ARMD9, C3a Anaphylatoxin, ASP, Complement Component C3a. C3a, Complement Component C3b, C3b, prepro-C3, Acylation-Stimulating Protein Cleavage Product, CPAMD1, Complement C3, C3 And PZP-Like Alpha-2-Macroglobulin Domain-Containing Protein 1, Complement Component C3, and AHUS5. The term “C3” includes human C3, the amino acid and nucleotide sequence of which may be found in, for example, GenBank Accession No. NM_000064.3 (GI: 726965399; SEQ ID NO:901); mouse C3, the amino acid and nucleotide sequence of which may be found in, for example, GenBank Accession No. NM_009778.3 (GI: 773669943; SEQ ID NO:903); and rat C3, the amino acid and nucleotide sequence of which may be found in, for example, GenBank Accession No. NM_016994.2 (GI: 158138560; SEQ ID NO905).

[0089] The term “C3” also includes Macaca fascicularis C3, the amino acid and nucleotide sequence of which may be found in, for example, GenBank Accession No. XM_005587719.2 (GI: 982312947; SEQ ID NO:907) and in the entry for the gene, ENSP00000245907 (locus=chr19: 6921416:6963034), in the Macaca genome project web site (http://macaque.genomics.org.cn/page/species/index.jsp).

[0090] Additional examples of C3 mRNA sequences are readily available using, e.g., GenBank, UniProt, OMIM, and the Macaca genome project web site.

[0091] Exemplary C3 nucleotide sequences may also be found in SEQ ID NOs: 901, 903, 905, and 907. SEQ ID NOs: 902, 904, 906, and 908 are the reverse complement sequences of SEQ ID NOs: 901, 903, 905, and 907, respectively.

[0092] Further information on C3 is provided, for example in the NCBI Gene database at www.nchi.nim.nih cov/gene/718.

[0093] The entire contents of each of the foregoing GenBank Accession numbers and the Gene database numbers are incorporated herein by reference as of the date of filing this application.

[0094] The terms “complement component C3” and “C3,” as used herein, also refers to naturally occurring DNA sequence variations of the C3 gene. Numerous seuqnce variations within the C3 gene have been identified and may be found at, for example, NCBI dbSNP and UniProt (see, e.g., www.ncbi.nlm.nih.gov/snp?LinkName=gene_snp&from_uid=718, the entire contents of which is incorporated herein by reference as of the date of filing this application.

[0095] As used herein, “target sequence” refers to a contiguous portion of the nucleotide sequence of an mRNA molecule formed during the transcription of a complement component C3 gene, including mRNA that is a product of RNA processing of a primary transcription product. In one embodiment, the target portion of the sequence will be at least long enough to serve as a substrate for iRNA-directed cleavage at or near that portion of the nucleotide sequence of an mRNA molecule formed during the transcription of a C3 gene. In one embodiment, the target sequence is within the protein coding region of the C3 gene. In another embodiment, the target sequence is within the 3′ UTR of the C3 gene.

[0096] The target equence may be from about 19-36 nucleotides in length, e.g., about 19-30 nucleotides in length. For example, the target sequence can be about 19-30 nucleotides, 19-30, 19-29, 19-28, 19-27, 19-26, 19-25, 19-24, 19-23, 19-22, 19-21, 19-20, 20-30, 20-29, 20-28, 20-27, 20-26, 20-25, 20-24, 20-23, 20-22, 20-21, 21-30, 21-29, 21-28, 21-27, 21-26, 21-25, 21-24, 21-23, or 21-22 nucleotides in length. In certain embodiments, the target sequence is 19-23 nucleotides in length, optionally 21-23 nucleotides in length. Ranges and lengths intermediate to the above recited ranges and lengths are also contemplated to be part of the disclosure.

[0097] As used herein, the term “strand comprising a sequence” refers to an oligonucleotide comprising a chain of nucleotides that is described by the sequence referred to using the standard nucleotide nomenclature.

[0098] “G,” “C,” “A,” “T,” and “U” each generally stand for a nucleotide that contains guanine, cytosine, adenine, thymidine, and uracil as a base, respectively. However, it will be understood that the term “ribonucleotide” or “nucleotide” can also refer to a modified nucleotide, as further detailed below, or a surrogate replacement moiety (see, e.g., Table 1). The skilled person is well aware that guanine, cytosine, adenine, and uracil can be replaced by other moieties without substantially altering the base pairing properties of an oligonucleotide comprising a nucleotide bearing such replacement moiety. For example, without limitation, a nucleotide comprising inosine as its base can base pair with nucleotides containing adenine, cytosine, or uracil. Hence, nucleotides containing uracil, guanine, or adenine can be replaced in the nucleotide sequences of dsRNA featured in the invention by a nucleotide containing, for example, inosine. In another example, adenine and cytosine anywhere in the oligonucleotide can be replaced with guanine and uracil, respectively to form G-U Wobble base pairing with the target mRNA. Sequences containing such replacement moieties are suitable for the compositions and methods featured in the invention.

[0099] The terms “IRNA”, “RNAi agent.” “iRNA agent.”, “RNA interference agent” as used interchangeably herein, refer to an agent that contains RNA as that term is defined herein, and which mediates the targeted cleavage of an RNA transcript via an RNA-induced silencing complex (RISC) pathway. iRNA directs the sequence-specific degradation of mRNA through a process known as RNA interference (RNAi). The iRNA modulates, e.g., inhibits, the expression of a C3 gene in a cell, e.g., a liver cell within a subject, such as a mammalian subject.

[0100] In one embodiment, an RNAi agent of the invention includes a single stranded RNA that interacts with a target RNA sequence, e.g., a C3 target mRNA sequence, to direct the cleavage of the target RNA. Without wishing to be bound by theory it is believed that long double stranded RNA introduced into cells is broken down into siRNA by a Type III endonuclease known as Dicer (Sharp et al. (2001) Genes Dev. 15:485). Dicer, a ribonuclease-III-like enzyme, processes the dsRNA into 19-23 base pair short interfering RNAs with characteristic two base 3′ overhangs (Bernstein, et al., (2001) Nature 409:363). The siRNAs are then incorporated into an RNA-induced silencing complex (RISC) where one or more helicases unwind the siRNA duplex, enabling the complementary antisense strand to guide target recognition (Nykanen, et al., (2001) Cell 107:309). Upon binding to the appropriate target mRNA, one or more endonucleases within the RISC cleave the target to induce silencing (Elbashir, et al., (2001) Genes Dev. 15:188). Thus, in one aspect the invention relates to a single stranded RNA (siRNA) generated within a cell and which promotes the formation of a RISC complex to effect silencing of the target gene, i.e., a C3 gene. Accordingly, the term “siRNA” is also used herein to refer to an iRNA as described above.

[0101] In certain embodiments, the RNAi agent may be a single-stranded siRNA (ssRNAi) that is introduced into a cell or organism to inhibit a target mRNA. Single-stranded RNAi agents bind to the RISC endonuclease, Argonaute 2, which then cleaves the target mRNA. The single-stranded siRNAs are generally 15-30 nucleotides and are chemically modified. The design and testing of single-stranded siRNAs are described in U.S. Pat. No. 8,101,348 and in Lima et al., (2012) Cell 150:883-894, the entire contents of each of which are hereby incorporated herein by reference. Any of the antisense nucleotide sequences described herein may be used as a single-stranded siRNA as described herein or as chemically modified by the methods described in Lima et al., (2012) Cell 150:883-894.

[0102] In certain embodiments, an “IRNA” for use in the compositions, uses, and methods of the invention is a double stranded RNA and is referred to herein as a “double stranded RNA agent,” “double stranded RNA (dsRNA) molecule,” “dsRNA agent,” or “dsRNA”. The term “dsRNA”, refers to a complex of ribonucleic acid molecules, having a duplex structure comprising two anti-parallel and substantially complementary nucleic acid strands, referred to as having “sense” and “antisense” orientations with respect to a target RNA, i.e., a C3 gene. In some embodiments of the invention, a double stranded RNA (dsRNA) triggers the degradation of a target RNA, e.g., an mRNA, through a post-transcriptional gene-silencing mechanism referred to herein as RNA interference or RNAi.

[0103] In general, the majority of nucleotides of each strand of a dsRNA molecule are ribonucleotides, but as described in detail herein, each or both strands can also include one or more non-ribonucleotides, e.g., a deoxyribonucleotide or a modified nucleotide. In addition, as used in this specification, an “iRNA” may include ribonucleotides with chemical modifications; an iRNA may include substantial modifications at multiple nucleotides. As used herein, the term “modified nucleotide” refers to a nucleotide having, independently, a modified sugar moiety, a modified internucleotide linkage, or modified nucleobase, or any combination thereof. Thus, the term modified nucleotide encompasses substitutions, additions or removal of, e.g., a functional group or atom, to internucleoside linkages, sugar moieties, or nucleobases. The modifications suitable for use in the agents of the invention include all types of modifications disclosed herein or known in the art. Any such modifications, as used in a siRNA type molecule, are encompassed by “iRNA” or “RNAi agent” for the purposes of this specification and claims.

[0104] In certain embodiments of the instant disclosure, inclusion of a deoxy-nucleotide if present within an RNAi agent can be considered to constitute a modified nucleotide.

[0105] The duplex region may be of any length that permits specific degradation of a desired target RNA through a RISC pathway, and may range from about 19 to 36 base pairs in length, e.g., about 19-30 base pairs in length, for example, about 9, 10, 11, 12, 13, 14, 15, 16, 17, 18, 19, 20, 21, 22, 23, 24, 25, 26, 27, 28, 29, 30, 31, 32, 33, 34, 35, or 36 base pairs in length, such as about 19-30, 19-29, 19-28, 19-27, 19-26, 19-25, 19-24, 19-23, 19-22, 19-21, 19-20, 20-30, 20-29, 20-28, 20-27, 20-26, 20-25, 20-24,20-23, 20-22, 20-21, 21-30, 21-29, 21-28, 21-27, 21-26, 21-25, 21-24, 21-23, or 21-22 base pairs in length. In certain embodiments, the duplex region is 19-21 base pairs in length, e.g., 21 base pairs in length. Ranges and lengths intermediate to the above recited ranges and lengths are also contemplated to be part of the disclosure.

[0106] The two strands forming the duplex structure may be different portions of one larger RNA molecule, or they may be separate RNA molecules. Where the two strands are part of one larger molecule, and therefore are connected by an uninterrupted chain of nucleotides between the 3′-end of one strand and the 5′-end of the respective other strand forming the duplex structure, the connecting RNA chain is referred to as a “hairpin loop.” A hairpin loop can comprise at least one unpaired nucleotide. In some embodiments, the hairpin loop can comprise at least 2, 3, 4, 5, 6, 7, 8, 9, 10, 20, 23 or more unpaired nucleotides. In some embodiments, the hairpin loop can be 10 or fewer nucleotides. In some embodiments, the hairpin loop can be 8 or fewer unpaired nucleotides. In some embodiments, the hairpin loop can be 4-10 unpaired nucleotides. In some embodiments, the hairpin loop can be 4-8 nucleotides.

[0107] Where the two substantially complementary strands of a dsRNA are comprised by separate RNA molecules, those molecules need not be, but can be covalently connected. Where the two strands are connected covalently by means other than an uninterrupted chain of nucleotides between the 3′-end of one strand and the 5′-end of the respective other strand forming the duplex structure, the connecting structure is referred to as a “linker.” The RNA strands may have the same or a different number of nucleotides. The maximum number of base pairs is the number of nucleotides in the shortest strand of the dsRNA minus any overhangs that are present in the duplex. In addition to the duplex structure, an RNAi may comprise one or more nucleotide overhangs. In one embodiment of the RNAi agent, at least one strand comprises a 3′ overhang of at least 1 nucleotide. In another embodiment, at least one strand comprises a 3′ overhang of at least 2 nucleotides, e.g., 2, 3, 4, 5, 6, 7, 9, 10, 11, 12, 13, 14, or 15 nucleotides. In other embodiments, at least one strand of the RNAi agent comprises a 5′ overhang of at least 1 nucleotide. In certain embodiments, at least one strand comprises a 5′ overhang of at least 2 nucleotides, e.g., 2, 3, 4, 5, 6, 7, 9, 10, 11, 12, 13, 14, or 15 nucleotides. In still other embodiments, both the 3′ and the 5′ end of one strand of the RNAi agent comprise an overhang of at least 1 nucleotide.

[0108] In certain embodiments, an iRNA agent of the invention is a dsRNA, each strand of which comprises 19-23 nucleotides, that interacts with a target RNA sequence, e.g., a C3 gene, to direct cleavage of the target RNA.

[0109] In some embodiments, an iRNA of the invention is a dsRNA of 24-30 nucleotides that interacts with a target RNA sequence, e.g., a C3 target mRNA sequence, to direct the cleavage of the target RNA.

[0110] As used herein, the term “nucleotide overhang” refers to at least one unpaired nucleotide that protrudes from the duplex structure of a double stranded iRNA. For example, when a 3′-end of one strand of a dsRNA extends beyond the 5′-end of the other strand, or vice versa, there is a nucleotide overhang. A dsRNA can comprise an overhang of at least one nucleotide; alternatively the overhang can comprise at least two nucleotides, at least three nucleotides, at least four nucleotides, at least five nucleotides or more. A nucleotide overhang can comprise or consist of a nucleotide/nucleoside analog, including a deoxynucleotide/nucleoside. The overhang(s) can be on the sense strand, the antisense strand, or any combination thereof. Furthermore, the nucleotide(s) of an overhang can be present on the 5′-end, 3′-end, or both ends of either an antisense or sense strand of a dsRNA.

[0111] In one embodiment, the antisense strand of a dsRNA has a 1-10 nucleotide, e.g., a 1, 2, 3, 4, 5, 6, 7, 8, 9, or 10 nucleotide, overhang at the 3′-end or the 5′-end. In one embodiment, the sense strand of a dsRNA has a 1-10 nucleotide, e.g., a 1, 2, 3, 4, 5, 6, 7, 8, 9, or 10 nucleotide, overhang at the 3′-end or the 5′-end. In another embodiment, one or more of the nucleotides in the overhang is replaced with a nucleoside thiophosphate.

[0112] In certain embodiments, the antisense strand of a dsRNA has a 1-10 nucleotide, e.g., 0-3, 1-3, 2-4, 2-5, 4-10, 5-10, e.g., a 1, 2, 3, 4, 5, 6, 7, 8, 9, or 10 nucleotide, overhang at the 3′-end or the 5′-end. In one embodiment, the sense strand of a dsRNA has a 1-10 nucleotide, e.g., a 1, 2, 3, 4, 5, 6, 7, 8, 9, or 10 nucleotide, overhang at the 3′-end or the 5′-end. In another embodiment, one or more of the nucleotides in the overhang is replaced with a nucleoside thiophosphate.

[0113] In certain embodiments, the antisense strand of a dsRNA has a 1-10 nucleotides, e.g., a 1, 2, 3, 4, 5, 6, 7, 8, 9, or 10 nucleotide, overhang at the 3′-end or the 5′-end. In certain embodiments, the overhang on the sense strand or the antisense strand, or both, can include extended lengths longer than 10 nucleotides, e.g., 1-30 nucleotides, 2-30 nucleotides, 10-30 nucleotides, 10-25 nucleotides, 10-20 nucleotides, or 10-15 nucleotides in length. In certain embodiments, an extended overhang is on the sense strand of the duplex. In certain embodiments, an extended overhang is present on the 3′ end of the sense strand of the duplex. In certain embodiments, an extended overhang is present on the 5′ end of the sense strand of the duplex. In certain embodiments, an extended overhang is on the antisense strand of the duplex. In certain embodiments, an extended overhang is present on the 3′ end of the antisense strand of the duplex. In certain embodiments, an extended overhang is present on the 5′ end of the antisense strand of the duplex. In certain embodiments, one or more of the nucleotides in the extended overhang is replaced with a nucleoside thiophosphate. In certain embodiments, the overhang includes a self-complementary portion such that the overhang is capable of forming a hairpin structure that is stable under physiological conditions.

[0114] “Blunt” or “blunt end” means that there are no unpaired nucleotides at that end of the double stranded RNA agent, i.e., no nucleotide overhang. A “blunt ended” double stranded RNA agent is double stranded over its entire length, i.e., no nucleotide overhang at either end of the molecule. The RNAi agents of the invention include RNAi agents with no nucleotide overhang at one end (i.e., agents with one overhang and one blunt end) or with no nucleotide overhangs at either end. Most often such a molecule will be double-stranded over its entire length.

[0115] The term “antisense strand” or “guide strand” refers to the strand of an iRNA, e.g., a dsRNA, which includes a region that is substantially complementary to a target sequence, e.g., a C3 mRNA.

[0116] As used herein, the term “region of complementarity” refers to the region on the antisense strand that is substantially complementary to a sequence, for example a target sequence, e.g., a C3 nucleotide sequence, as defined herein. Where the region of complementarity is not fully complementary to the target sequence, the mismatches can be in the internal or terminal regions of the molecule. Generally, the most tolerated mismatches are in the terminal regions, e.g., within 5, 4, or 3 nucleotides of the 5′- or 3′-end of the iRNA. In some embodiments, a double stranded RNA agent of the invention includes a nucleotide mismatch in the antisense strand. In some embodiments, the antisense strand of the double stranded RNA agent of the invention includes no more than 4 mismatches with the target mRNA, e.g., the antisense strand includes 4, 3, 2, 1, or 0 mismatches with the target mRNA. In some embodiments, the antisense strand double stranded RNA agent of the invention includes no more than 4 mismatches with the sense strand, e.g., the antisense strand includes 4, 3, 2, 1, or 0 mismatches with the sense strand. In some embodiments, a double stranded RNA agent of the invention includes a nucleotide mismatch in the sense strand. In some embodiments, the sense strand of the double stranded RNA agent of the invention includes no more than 4 mismatches with the antisense strand, e.g., the sense strand includes 4, 3, 2, 1, or 0 mismatches with the antisense strand. In some embodiments, the nucleotide mismatch is, for example, within 5, 4, 3 nucleotides from the 3′-end of the iRNA. In another embodiment, the nucleotide mismatch is, for example, in the 3′-terminal nucleotide of the iRNA agent. In some embodiments, the mismatch(s) is not in the seed region.

[0117] Thus, an RNAi agent as described herein can contain one or more mismatches to the target sequence. In one embodiment, an RNAi agent as described herein contains no more than 3 mismatches (i.e., 3, 2, 1, or 0 mismatches). In one embodiment, an RNAi agent as described herein contains no more than 2 mismatches. In one embodiment, an RNAi agent as described herein contains no more than 1 mismatch. In one embodiment, an RNAi agent as described herein contains 0 mismatches. In certain embodiments, if the antisense strand of the RNAi agent contains mismatches to the target sequence, the mismatch can optionally be restricted to be within the last 5 nucleotides from either the 5′- or 3′-end of the region of complementarity. For example, in such embodiments, for a 23 nucleotide RNAi agent, the strand which is complementary to a region of a C3 gene, generally does not contain any mismatch within the central 13 nucleotides. The methods described herein or methods known in the art can be used to determine whether an RNAi agent containing a mismatch to a target sequence is effective in inhibiting the expression of a C3 gene. Consideration of the efficacy of RNAi agents with mismatches in inhibiting expression of a C3 gene is important, especially if the particular region of complementarity in a C3 gene is known to have polymorphic sequence variation within the population.

[0118] The term “sense strand” or “passenger strand” as used herein, refers to the strand of an iRNA that includes a region that is substantially complementary to a region of the antisense strand as that term is defined herein.

[0119] As used herein, “substantially all of the nucleotides are modified” are largely but not wholly modified and can include not more than 5, 4, 3, 2, or 1 unmodified nucleotides.

[0120] As used herein, the term “cleavage region” refers to a region that is located immediately adjacent to the cleavage site. The cleavage site is the site on the target at which cleavage occurs. In some embodiments, the cleavage region comprises three bases on either end of, and immediately adjacent to, the cleavage site. In some embodiments, the cleavage region comprises two bases on either end of, and immediately adjacent to, the cleavage site. In some embodiments, the cleavage site specifically occurs at the site bound by nucleotides 10 and 11 of the antisense strand, and the cleavage region comprises nucleotides 11, 12 and 13.

[0121] As used herein, and unless otherwise indicated, the term “complementary.” when used to describe a first nucleotide sequence in relation to a second nucleotide sequence, refers to the ability of an oligonucleotide or polynucleotide comprising the first nucleotide sequence to hybridize and form a duplex structure under certain conditions with an oligonucleotide or polynucleotide comprising the second nucleotide sequence, as will be understood by the skilled person. Such conditions can, for example, be stringent conditions, where stringent conditions can include: 400 mM NaCl, 40 mM PIPES pH 6.4, 1 mM EDTA, 50° C. or 70° C. for 12-16 hours followed by washing (see, e.g., “Molecular Cloning: A Laboratory Manual, Sambrook, et al. (1989) Cold Spring Harbor Laboratory Press). Other conditions, such as physiologically relevant conditions as can be encountered inside an organism, can apply. The skilled person will be able to determine the set of conditions most appropriate for a test of complementarity of two sequences in accordance with the ultimate application of the hybridized nucleotides.

[0122] Complementary sequences within an iRNA, e.g., within a dsRNA as described herein, include base-pairing of the oligonucleotide or polynucleotide comprising a first nucleotide sequence to an oligonucleotide or polynucleotide comprising a second nucleotide sequence over the entire length of one or both nucleotide sequences. Such sequences can be referred to as “fully complementary” with respect to each other herein. However, where a first sequence is referred to as “substantially complementary” with respect to a second sequence herein, the two sequences can be fully complementary, or they can form one or more, but generally not more than 5, 4, 3, or 2 mismatched base pairs upon hybridization for a duplex up to 30 base pairs, while retaining the ability to hybridize under the conditions most relevant to their ultimate application, e.g., inhibition of gene expression, in vitro or in vivo. However, where two oligonucleotides are designed to form, upon hybridization, one or more single stranded overhangs, such overhangs shall not be regarded as mismatches with regard to the determination of complementarity. For example, a dsRNA comprising one oligonucleotide 21 nucleotides in length and another oligonucleotide 23 nucleotides in length, wherein the longer oligonucleotide comprises a sequence of 21 nucleotides that is fully complementary to the shorter oligonucleotide, can yet be referred to as “fully complementary” for the purposes described herein.

[0123] “Complementary” sequences, as used herein, can also include, or be formed entirely from, non-Watson-Crick base pairs or base pairs formed from non-natural and modified nucleotides, in so far as the above requirements with respect to their ability to hybridize are fulfilled. Such non-Watson-Crick base pairs include, but are not limited to, G:U Wobble or Hoogsteen base pairing.

[0124] The terms “complementary.” “fully complementary” and “substantially complementary” herein can be used with respect to the base matching between the sense strand and the antisense strand of a dsRNA, or between two oligonucleotides or polynucleotides, such as the antisense strand of a double stranded RNA agent and a target sequence, as will be understood from the context of their use.

[0125] As used herein, a polynucleotide that is “substantially complementary to at least part of” a messenger RNA (mRNA) refers to a polynucleotide that is substantially complementary to a contiguous portion of the mRNA of interest (e.g., an mRNA encoding a C3 gene). For example, a polynucleotide is complementary to at least a part of a C3 mRNA if the sequence is substantially complementary to a non-interrupted portion of an mRNA encoding a C3 gene.

[0126] Accordingly, in some embodiments, the antisense polynucleotides disclosed herein are fully complementary to the target C3 sequence. In other embodiments, the antisense polynucleotides disclosed herein are substantially complementary to the target C3 sequence and comprise a contiguous nucleotide sequence which is at least 80% complementary over its entire length to the equivalent region of the nucleotide sequence of any one of SEQ ID NOs: 901, 903, 905 or 907, or a fragment of any one of SEQ ID NOs: 901, 903, 905 or 907, such as about 85%, about 90%, about 91%, about 92%, about 93%, about 94%, about 95%, about 96%, about 97%, about 98%, or about 99% complementary.

[0127] In some embodiments, the antisense polynucleotides disclosed herein are substantially complementary to a fragment of a target C3 sequence and comprise a contiguous nucleotide sequence which is at least 80% complementary over its entire length to a fragment of SEQ ID NO: 901 selected from the group of nucleotides 809-831, 810-832, 811-831, 812-832, 2632-2654, 2633-2655, 2634-2654, 2634-2656, or 2635-2655 of SEQ ID NO: 901, such as about 85%, about 90%, about 91%, about 92%, about 93%, about 94%, about 95%, about 96%, about 97%, about 98%, or about 99% complementary.

[0128] In some embodiments, the antisense polynucleotides disclosed herein are substantially complementary to a fragment of a target C3 sequence and comprise a contiguous nucleotide sequence which is at least 80% complementary over its entire length to a fragment of SEQ ID NO: 901 selected from the group of nucleotides 809-831, 2632-2654, 2633-2655, or 2634-2656 of SEQ ID NO: 901, such as about 85%, about 90%, about 91%, about 92%, about 93%, about 94%, about 95%, about 96%, about 97%, about 98%, or about 99% complementary.

[0129] In other embodiments, the antisense polynucleotides disclosed herein are substantially complementary to the target C3 sequence and comprise a contiguous nucleotide sequence which is at least about 80% complementary over its entire length to any one of the sense strand nucleotide sequences in any one of any one of Tables 2-5, or a fragment of any one of the sense strand nucleotide sequences in any one of Tables 2-5, such as about 85%, about 90%, about 91%, about 92%, about 93%, about 94%, about 95%, about 96%, about 97%, about 98%, about 99%, or 100% complementary.

[0130] In one embodiment, an RNAi agent of the disclosure includes a sense strand that is substantially complementary to an antisense polynucleotide which, in turn, is the same as a target C3 sequence, and wherein the sense strand polynucleotide comprises a contiguous nucleotide sequence which is at least about 80% complementary over its entire length to the equivalent region of the nucleotide sequence of SEQ ID NOs: 902, 904, 906, or 908, or a fragment of any one of SEQ ID NOs: 902, 904, 906, or 908, such as about 85%, about 90%, about 91%, about 92%, about 93%, about 94%, about 95%, about 96%, about 97%, about 98%, about 99%, or 100% complementary.

[0131] In some embodiments, an iRNA of the invention includes a sense strand that is substantially complementary to an antisense polynucleotide which, in turn, is complementary to a target C3 sequence, and wherein the sense strand polynucleotide comprises a contiguous nucleotide sequence which is at least about 80% complementary over its entire length to any one of the antisense strand nucleotide sequences in any one of any one of Tables 2-5, or a fragment of any one of the antisense strand nucleotide sequences in any one of Tables 2-5, such as about 85%, about 90%, about 91%, about 92%, about 93%, about 94%, about 95%, about 96%, about 97%, about 98%, about 99%, or 100% complementary.

[0132] In certain embodiments, the sense and antisense strands are selected from any one of duplexes AD-569268.9, AD-1479342.2, AD-1479343.2, AD-1479344.2, AD-1479345.2, AD-1479346.2, AD-570712.6, AD-1479289.2, AD-570713.5, AD-570714.11, AD-1479311.2, AD-1479312.2, AD-1479317.2, and AD-1479328.2.

[0133] In general, an “iRNA” includes ribonucleotides with chemical modifications. Such modifications may include all types of modifications disclosed herein or known in the art. Any such modifications, as used in a dsRNA molecule, are encompassed by “iRNA” for the purposes of this specification and claims.

[0134] In certain embodiments of the instant disclosure, inclusion of a deoxy-nucleotide if present within an RNAi agent can be considered to constitute a modified nucleotide.

[0135] In an aspect of the invention, an agent for use in the methods and compositions of the invention is a single-stranded antisense oligonucleotide molecule that inhibits a target mRNA via an antisense inhibition mechanism. The single-stranded antisense oligonucleotide molecule is complementary to a sequence within the target mRNA. The single-stranded antisense oligonucleotides can inhibit translation in a stoichiometric manner by base pairing to the mRNA and physically obstructing the translation machinery, see Dias, N. et al., (2002) Mol Cancer Ther 1:347-355. The single-stranded antisense oligonucleotide molecule may be about 14 to about 30 nucleotides in length and have a sequence that is complementary to a target sequence. For example, the single-stranded antisense oligonucleotide molecule may comprise a sequence that is at least about 14, 15, 16, 17, 18, 19, 20, or more contiguous nucleotides from any one of the antisense sequences described herein.

[0136] The phrase “contacting a cell with an iRNA,” such as a dsRNA, as used herein, includes contacting a cell by any possible means. Contacting a cell with an iRNA includes contacting a cell in vitro with the iRNA or contacting a cell in vivo with the iRNA. The contacting may be done directly or indirectly. Thus, for example, the iRNA may be put into physical contact with the cell by the individual performing the method, or alternatively, the iRNA may be put into a situation that will permit or cause it to subsequently come into contact with the cell.

[0137] Contacting a cell in vitro may be done, for example, by incubating the cell with the iRNA. Contacting a cell in vivo may be done, for example, by injecting the iRNA into or near the tissue where the cell is located, or by injecting the iRNA into another area, e.g., the bloodstream or the subcutaneous space, such that the agent will subsequently reach the tissue where the cell to be contacted is located. For example, the iRNA may contain or be coupled to a ligand, e.g., GalNAc, that directs the iRNA to a site of interest, e.g., the liver. Combinations of in vitro and in vivo methods of contacting are also possible. For example, a cell may also be contacted in vitro with an iRNA and subsequently transplanted into a subject.

[0138] In certain embodiments, contacting a cell with an iRNA includes “introducing” or “delivering the iRNA into the cell” by facilitating or effecting uptake or absorption into the cell. Absorption or uptake of an iRNA can occur through unaided diffusion or active cellular processes, or by auxiliary agents or devices. Introducing an iRNA into a cell may be in vitro or in vivo. For example, for in vivo introduction, iRNA can be injected into a tissue site or administered systemically. In vitro introduction into a cell includes methods known in the art such as electroporation and lipofection. Further approaches are described herein below or are known in the art.

[0139] The term “lipid nanoparticle” or “LNP” is a vesicle comprising a lipid layer encapsulating a pharmaceutically active molecule, such as a nucleic acid molecule, e.g., an iRNA or a plasmid from which an iRNA is transcribed. LNPs are described in, for example, U.S. Pat. Nos. 6,858,225, 6,815,432, 8,158,601, and 8,058,069, the entire contents of which are hereby incorporated herein by reference.

[0140] As used herein, a “subject” is an animal, such as a mammal, including a primate (such as a human, a non-human primate, e.g., a monkey, and a chimpanzee), a non-primate (such as a cow, a pig, a horse, a goat, a rabbit, a sheep, a hamster, a guinea pig, a cat, a dog, a rat, or a mouse), or a bird that expresses the target gene, either endogenously or heterologously. In an embodiment, the subject is a human, such as a human being treated or assessed for a disease or disorder that would benefit from reduction in C3 expression; a human at risk for a disease or disorder that would benefit from reduction in C3 expression; a human having a disease or disorder that would benefit from reduction in C3 expression; or human being treated for a disease or disorder that would benefit from reduction in C3 expression as described herein.

[0141] As used herein, the terms “treating” or “treatment” refer to a beneficial or desired result, such as reducing at least one sign or symptom of a C3-associated disorder in a subject. Treatment also includes a reduction of one or more sign or symptoms associated with unwanted C3 expression; diminishing the extent of unwanted C3 activation or stabilization; amelioration or palliation of unwanted C3 activation or stabilization. “Treatment” can also mean prolonging survival as compared to expected survival in the absence of treatment.

[0142] The term “lower” in the context of the level of C3 in a subject or a disease marker or symptom refers to a statistically significant decrease in such level. The decrease can be, for example, at least 10%, 15%, 20%, 25%, 30%, %, 40%, 45%, 50%, 55%, 60%, 65%, 70%, 75%, 80%, 85%, 90%, 95%, or more. In certain embodiments, a decrease is at least 20%. In certain embodiments, the decrease is at least 50% in a disease marker, e.g., protein or gene expression level. “Lower” in the context of the level of C3 in a subject is a decrease to a level accepted as within the range of normal for an individual without such disorder. In certain embodiments, “lower” is the decrease in the difference between the level of a marker or symptom for a subject suffering from a disease and a level accepted within the range of normal for an individual. The term “lower” can also be used in association with normalizing a symptom of a disease or condition, i.e. decreasing the difference between a level in a subject suffering from a C3-associated disorder towards or to a level in a normal subject not suffering from a C3-associated disorder. As used herein, if a disease is associated with an elevated value for a symptom. “normal” is considered to be the upper limit of normal. If a disease is associated with a decreased value for a symptom, “normal” is considered to be the lower limit of normal.

[0143] As used herein, “prevention” or “preventing,” when used in reference to a disease, disorder, or condition thereof, that would benefit from a reduction in expression of a C3 gene or production of a C3 protein, refers to a reduction in the likelihood that a subject will develop a symptom associated with such a disease, disorder, or condition, e.g., a symptom of a C₃-associated disease. The failure to develop a disease, disorder, or condition, or the reduction in the development of a symptom associated with such a disease, disorder, or condition (e.g., by at least about 10% on a clinically accepted scale for that disease or disorder), or the exhibition of delayed symptoms delayed (e.g., by days, weeks, months or years) is considered effective prevention.

[0144] As used herein, the term “complement component C3-associated disease”, “C3-associated disease,” “complement component C3-associated disorder” or “C3-associated disorder,” is a disease or disorder that is caused by, or associated with complement activation. The term “complement component C3-associated disease” includes a disease, disorder or condition that would benefit from reduction in C3 expression. Such diseases are typically associated with inflammation and/or immune system activation, e.g., membrane attack complex-mediated lysis, anaphylaxis, and/or hemolysis.

[0145] Non-limiting examples of complement component C3-associated diseases include paroxysmal nocturnal hemoglobinuria (PNH), atypical hemolytic uremic syndrome (aHUS), asthma, rheumatoid arthritis (RA); antiphospholipid antibody syndrome; lupus nephritis; ischemia-reperfusion injury; typical or infectious hemolytic uremic syndrome (tHUS); dense deposit disease (DDD); neuromyelitis optica (NMO), multifocal motor neuropathy (MMN); multiple sclerosis (MS); macular degeneration (e.g., age-related macular degeneration (AMD)); systemic lupus erythmatosis; hemolysis, elevated liver enzymes, and low platelets (HELLP) syndrome; thrombotic thrombocytopenia purpura (TTP); spontaneous fetal loss; Pauci-immune vasculitis; epidermolysis bullosa; recurrent fetal loss; pre-eclampsia, traumatic brain injury, myasthenia gravis, cold agglutinin disease, dermatomyositis bullous pemphigoid, Shiga toxin E. coli-related hemolytic uremic syndrome, C3 neuropathy, anti-neutrophil cytoplasmic antibody-associated vasculitis (e.g., granulomatosis with polyangiitis (previously known as Wegener granulomatosis), Churg-Strauss syndrome, and microscopic polyangiitis), humoral and vascular transplant rejection, graft dysfunction, myocardial infarction (e.g., tissue damage and ischemia in myocardial infarction), an allogenic transplant, sepsis (e.g., poor outcome in sepsis), Coronary artery disease, dermatomyositis, Graves' disease, atherosclerosis, Alzheimer's disease, systemic inflammatory response sepsis, septic shock, spinal cord injury, glomerulonephritis, Hashimoto's thyroiditis, type I diabetes, psoriasis, pemphigus, autoimmune hemolytic anemia (AIHA), ITP. Goodpasture syndrome, Degos disease, antiphospholipid syndrome (APS), catastrophic APS (CAPS), a cardiovascular disorder, myocarditis, a cerebrovascular disorder, a peripheral (e.g., musculoskeletal) vascular disorder, a renovascular disorder, a mesenteric/enteric vascular disorder, vasculitis, Henoch-Schönlein purpura nephritis, systemic lupus erythematosus-associated vasculitis, vasculitis associated with rheumatoid arthritis, immune complex vasculitis, Takayasu's disease, dilated cardiomyopathy, diabetic angiopathy, Kawasaki's disease (arteritis), venous gas embolus (VGE), and restenosis following stent placement, rotational atherectomy, and percutaneous transluminal coronary angioplasty (PTCA) (see, e.g., Holers (2008) Immunological Reviews 223:300-316; Holers and Thurman (2004) Molecular Immunology 41:147-152; U.S. Patent Publication No. 20070172483).

[0146] In one embodiment, a complement component C3-associated disease is paroxysmal nocturnal hemoglobinuria (PNH). The PNH may be classical PNH or PNH in the setting of another bone marrow failure syndrome and/or myelodysplastic syndromes (MDS), e.g., cytopenias.

[0147] In another embodiment, a complement component C3-associated disease is atypical hemolytic uremic syndrome (aHUS).

[0148] In another embodiment, a complement component C3-associated disease is neuromyelitis optica (NMO). NMO is the co-occurrence of optic neuritis with myelitis. In some embodiments, a subject having NMO may also have multiple sclerosis (MS); acute disseminated encephalomyelitis (ADEM); systemic lupus erythematosus (SLE); Sjögren syndrome; a viral infection; or a bacterial infection.

[0149] In yet another embodiment, a complement component C3-associated disease is multifocal motor neuropathy (MMN).

[0150] In another embodiment, a complement component C3-associated disease is myasthenia gravis (MG). The MG may be an ocular form of MG, a generalized form of MG, or a combination of ocular and generalized MG.

[0151] In another embodiment, a complement component C3-associated disease is C3 glomerulonephritis.

[0152] In one embodiment, a complement component C3-associated disease is systemic lupus erythmatosis.

[0153] “Therapeutically effective amount,” as used herein, is intended to include the amount of an RNAi agent that, when administered to a subject having a C3-associated disorder, is sufficient to effect treatment of the disease (e.g., by diminishing, ameliorating, or maintaining the existing disease or one or more symptoms of disease). The “therapeutically effective amount” may vary depending on the RNAi agent, how the agent is administered, the disease and its severity and the history, age, weight, family history, genetic makeup, the types of preceding or concomitant treatments, if any, and other individual characteristics of the subject to be treated.

[0154] “Prophylactically effective amount,” as used herein, is intended to include the amount of an RNAi agent that, when administered to a subject having a C3-associated disorder, is sufficient to prevent or ameliorate the disorder or one or more symptoms of the disorder. Ameliorating the disease includes slowing the course of the disease or reducing the severity of later-developing disease. The “prophylactically effective amount” may vary depending on the RNAi agent, how the agent is administered, the degree of risk of disease, and the history, age, weight, family history, genetic makeup, the types of preceding or concomitant treatments, if any, and other individual characteristics of the patient to be treated.

[0155] A “therapeutically-effective amount” or “prophylactically effective amount” also includes an amount of an RNAi agent that produces some desired effect at a reasonable benefit/risk ratio applicable to any treatment. The iRNA employed in the methods of the present invention may be administered in a sufficient amount to produce a reasonable benefit/risk ratio applicable to such treatment.

[0156] The phrase “pharmaceutically acceptable” is employed herein to refer to those compounds (including salts), materials, compositions, or dosage forms which are, within the scope of sound medical judgment, suitable for use in contact with the tissues of human subjects and animal subjects without excessive toxicity, irritation, allergic response, or other problem or complication, commensurate with a reasonable benefit/risk ratio.

[0157] The phrase “pharmaceutically-acceptable carrier” as used herein means a pharmaceutically-acceptable material, composition, or vehicle, such as a liquid or solid filler, diluent, excipient, manufacturing aid (e.g., lubricant, talc magnesium, calcium or zinc stearate, or steric acid), or solvent encapsulating material, involved in carrying or transporting the subject compound from one organ, or portion of the body, to another organ, or portion of the body. Each carrier must be “acceptable” in the sense of being compatible with the other ingredients of the formulation and not injurious to the subject being treated. Such carriers are known in the art. Pharmaceutically acceptable carriers include carriers for administration by injection.

[0158] The term “sample.” as used herein, includes a collection of similar fluids, cells, or tissues isolated from a subject, as well as fluids, cells, or tissues present within a subject. Examples of biological fluids include blood, serum and serosal fluids, plasma, cerebrospinal fluid, ocular fluids, lymph, urine, saliva, and the like. Tissue samples may include samples from tissues, organs, or localized regions. For example, samples may be derived from particular organs, parts of organs, or fluids or cells within those organs. In certain embodiments, samples may be derived from the liver (e.g., whole liver or certain segments of liver or certain types of cells in the liver, such as, e.g., hepatocytes). In some embodiments, a “sample derived from a subject” refers to urine obtained from the subject. A “sample derived from a subject” can refer to blood or blood derived serum or plasma from the subject.

### II. iRNAs of the Invention

[0159] The present invention provides iRNAs which inhibit the expression of a C3 gene. In certain embodiments, the iRNA includes double stranded ribonucleic acid (dsRNA) molecules for inhibiting the expression of a C3 gene in a cell, such as a cell within a subject, e.g., a mammal, such as a human susceptible to developing a C3-associated disorder, e.g., paroxysmal nocturnal hemoglobinuria (PNH), atypical hemolytic uremic syndrome (aHUS), atypical hemolytic uremic syndrome (aHUS), neuromyelitis optica (NMO), multifocal motor neuropathy (MMN), myasthenia gravis (MG), C3 glomerulonephritis, or systemic lupus erythmatosis. The dsRNAi agent includes an antisense strand having a region of complementarity which is complementary to at least a part of an mRNA formed in the expression of a C3 gene. The region of complementarity is about 19-30 nucleotides in length (e.g., about 30, 29, 28, 27, 26, 25, 24, 23, 22, 21, 20, or 19 nucleotides in length).

[0160] Upon contact with a cell expressing the C3 gene, the iRNA inhibits the expression of the C3 gene (e.g., a human, a primate, a non-primate, or a rat C3 gene) by at least about 50% as assayed by, for example, a PCR or branched DNA (bDNA)-based method, or by a protein-based method, such as by immunofluorescence analysis, using, for example, western blotting or flow cytometric techniques. In certain embodiments, inhibition of expression is determined by the qPCR method provided in the examples herein with the siRNA at, e.g., a 10 nM concentration, in an appropriate organism cell line provided therein. In certain embodiments, inhibition of expression in vivo is determined by knockdown of the human gene in a rodent expressing the human gene, e.g., a mouse or an AAV-infected mouse expressing the human target gene, e.g., when administered as single dose, e.g., at 3 mg/kg at the nadir of RNA expression.

[0161] A dsRNA includes two RNA strands that are complementary and hybridize to form a duplex structure under conditions in which the dsRNA will be used. One strand of a dsRNA (the antisense strand) includes a region of complementarity that is substantially complementary, and generally fully complementary, to a target sequence. The target sequence can be derived from the sequence of an mRNA formed during the expression of a C3 gene. The other strand (the sense strand) includes a region that is complementary to the antisense strand, such that the two strands hybridize and form a duplex structure when combined under suitable conditions. As described elsewhere herein and as known in the art, the complementary sequences of a dsRNA can also be contained as self-complementary regions of a single nucleic acid molecule, as opposed to being on separate oligonucleotides.

[0162] Generally, the duplex structure is 15 to 30 base pairs in length, e.g., 15-29, 15-28, 15-27, 15-26, 15-25, 15-24, 15-23, 15-22, 15-21, 15-20, 15-19, 15-18, 15-17, 18-30, 18-29, 18-28, 18-27, 18-26, 18-25, 18-24, 18-23, 18-22, 18-21, 18-20, 19-30, 19-29, 19-28, 19-27, 19-26, 19-25, 19-24, 19-23, 19-22, 19-21, 19-20, 20-30, 20-29, 20-28, 20-27, 20-26, 20-25, 20-24,20-23, 20-22, 20-21, 21-30, 21-29, 21-28, 21-27, 21-26, 21-25, 21-24, 21-23, or 21-22 base pairs in length. In certain embodiments, the duplex structure is 18 to 25 base pairs in length, e.g., 18-25, 18-24, 18-23, 18-22, 18-21, 18-20, 19-25, 19-24, 19-23, 19-22, 19-21, 19-20, 20-25, 20-24,20-23, 20-22, 20-21, 21-25, 21-24, 21-23, 21-22, 22-25, 22-24, 22-23, 23-25, 23-24 or 24-25 base pairs in length, for example, 19-21 basepairs in length. Ranges and lengths intermediate to the above recited ranges and lengths are also contemplated to be part of the disclosure.

[0163] Similarly, the region of complementarity to the target sequence is 15 to 30 nucleotides in length, e.g., 15-29, 15-28, 15-27, 15-26, 15-25, 15-24, 15-23, 15-22, 15-21, 15-20, 15-19, 15-18, 15-17, 18-30, 18-29, 18-28, 18-27, 18-26, 18-25, 18-24, 18-23, 18-22, 18-21, 18-20, 19-30, 19-29, 19-28, 19-27, 19-26, 19-25, 19-24, 19-23, 19-22, 19-21, 19-20, 20-30, 20-29, 20-28, 20-27, 20-26, 20-25, 20-24,20-23, 20-22, 20-21, 21-30, 21-29, 21-28, 21-27, 21-26, 21-25, 21-24, 21-23, or 21-22 nucleotides in length, for example 19-23 nucleotides in length or 21-23 nucleotides in length. Ranges and lengths intermediate to the above recited ranges and lengths are also contemplated to be part of the disclosure.

[0164] In some embodiments, the duplex structure is 19 to 30 base pairs in length. Similarly, the region of complementarity to the target sequence is 19 to 30 nucleotides in length.

[0165] In some embodiments, the dsRNA is about 19 to about 23 nucleotides in length, or about 25 to about 30 nucleotides in length. In general, the dsRNA is long enough to serve as a substrate for the Dicer enzyme. For example, it is well-known in the art that dsRNAs longer than about 21-23 nucleotides in length may serve as substrates for Dicer. As the ordinarily skilled person will also recognize, the region of an RNA targeted for cleavage will most often be part of a larger RNA molecule, often an mRNA molecule. Where relevant, a “part” of an mRNA target is a contiguous sequence of an mRNA target of sufficient length to allow it to be a substrate for RNAi-directed cleavage (i.e., cleavage through a RISC pathway).

[0166] One of skill in the art will also recognize that the duplex region is a primary functional portion of a dsRNA, e.g., a duplex region of about 19 to about 30 base pairs, e.g., about 19-30, 19-29, 19-28, 19-27, 19-26, 19-25, 19-24, 19-23, 19-22, 19-21, 19-20, 20-30, 20-29, 20-28, 20-27, 20-26, 20-25, 20-24,20-23, 20-22, 20-21, 21-30, 21-29, 21-28, 21-27, 21-26, 21-25, 21-24, 21-23, or 21-22 base pairs. Thus, in one embodiment, to the extent that it becomes processed to a functional duplex, of e.g., 15-30 base pairs, that targets a desired RNA for cleavage, an RNA molecule or complex of RNA molecules having a duplex region greater than 30 base pairs is a dsRNA. Thus, an ordinarily skilled artisan will recognize that in one embodiment, a miRNA is a dsRNA. In another embodiment, a dsRNA is not a naturally occurring miRNA. In another embodiment, an iRNA agent useful to target C3 gene expression is not generated in the target cell by cleavage of a larger dsRNA.

[0167] A dsRNA as described herein can further include one or more single-stranded nucleotide overhangs, e.g., 1-4, 2-4, 1-3, 2-3, 1, 2, 3, or 4 nucleotides. dsRNAs having at least one nucleotide overhang can have superior inhibitory properties relative to their blunt-ended counterparts. A nucleotide overhang can comprise or consist of a nucleotide/nucleoside analog, including a deoxynucleotide/nucleoside. The overhang(s) can be on the sense strand, the antisense strand, or any combination thereof. Furthermore, the nucleotide(s) of an overhang can be present on the 5′-end, 3′-end, or both ends of an antisense or sense strand of a dsRNA.

[0168] A dsRNA can be synthesized by standard methods known in the art. Double stranded RNAi compounds of the invention may be prepared using a two-step procedure. First, the individual strands of the double stranded RNA molecule are prepared separately. Then, the component strands are annealed. The individual strands of the siRNA compound can be prepared using solution-phase or solid-phase organic synthesis or both. Organic synthesis offers the advantage that the oligonucleotide strands comprising unnatural or modified nucleotides can be easily prepared. Similarly, single-stranded oligonucleotides of the invention can be prepared using solution-phase or solid-phase organic synthesis or both.

[0169] In an aspect, a dsRNA of the invention includes at least two nucleotide sequences, a sense sequence and an anti-sense sequence. The sense strand is selected from the group of sequences provided in any one of Tables 2-5, and the corresponding antisense strand of the sense strand is selected from the group of sequences of any one of Tables 2-5. In this aspect, one of the two sequences is complementary to the other of the two sequences, with one of the sequences being substantially complementary to a sequence of an mRNA generated in the expression of a C3 gene. As such, in this aspect, a dsRNA will include two oligonucleotides, where one oligonucleotide is described as the sense strand in any one of Tables 2-5, and the second oligonucleotide is described as the corresponding antisense strand of the sense strand in any one of Tables 2-5.

[0170] In certain embodiments, the substantially complementary sequences of the dsRNA are contained on separate oligonucleotides. In other embodiments, the substantially complementary sequences of the dsRNA are contained on a single oligonucleotide.

[0171] In certain embodiments, the sense or antisense strand is selected from the sense or antisense strand of any one of duplexes AD-569268.9. AD-1479342.2, AD-1479343.2, AD-1479344.2, AD-1479345.2. AD-1479346.2, AD-570712.6, AD-1479289.2, AD-570713.5, AD-570714.11, AD-1479311.2. AD-1479312.2, AD-1479317.2, and AD-1479328.2.

[0172] It will be understood that, although the sequences in, for example, Table 2, are not described as modified or conjugated sequences, the RNA of the iRNA of the invention e.g., a dsRNA of the invention, may comprise any one of the sequences set forth in any one of Tables 2-5 that is un-modified, un-conjugated, or modified or conjugated differently than described therein. In other words, the invention encompasses dsRNA of Tables 2-5 which are un-modified, un-conjugated, modified, or conjugated, as described herein.

[0173] The skilled person is well aware that dsRNAs having a duplex structure of about 20 to 23 base pairs, e.g., 21, base pairs have been hailed as particularly effective in inducing RNA interference (Elbashir et al., EMBO 2001, 20:6877-6888). However, others have found that shorter or longer RNA duplex structures can also be effective (Chu and Rana (2007) RNA 14:1714-1719; Kim et al. (2005) Nat Biotech 23:222-226). In the embodiments described above, by virtue of the nature of the oligonucleotide sequences provided in any one of Tables 2-5. dsRNAs described herein can include at least one strand of a length of minimally 21 nucleotides. It can be reasonably expected that shorter duplexes having any one of the sequences in any one of Tables 2-5 minus only a few nucleotides on one or both ends can be similarly effective as compared to the dsRNAs described above. Hence, dsRNAs having a sequence of at least 19, 20, or more contiguous nucleotides derived from any one of the sequences of any one of Tables 2-5, and differing in their ability to inhibit the expression of a C3 gene by not more than about 5, 10, 15, 20, 25, or 30% inhibition from a dsRNA comprising the full sequence, are contemplated to be within the scope of the present invention.

[0174] In addition, the RNAs provided in Tables 2-5 identify a site(s) in a C3 transcript that is susceptible to RISC-mediated cleavage. As such, the present invention further features iRNAs that target within one of these sites. As used herein, an iRNA is said to target within a particular site of an RNA transcript if the iRNA promotes cleavage of the transcript anywhere within that particular site. Such an iRNA will generally include at least about 19 contiguous nucleotides from any one of the sequences provided in any one of Tables 2-5 coupled to additional nucleotide sequences taken from the region contiguous to the selected sequence in a C3 gene.

### III. Modified iRNAs of the Invention

[0175] In certain embodiments, the RNA of the iRNA of the invention e.g., a dsRNA, is un-modified, and does not comprise, e.g., chemical modifications or conjugations known in the art and described herein. In other embodiments, the RNA of an iRNA of the invention, e.g., a dsRNA, is chemically modified to enhance stability or other beneficial characteristics. In certain embodiments of the invention, substantially all of the nucleotides of an iRNA of the invention are modified. In other embodiments of the invention, all of the nucleotides of an iRNA or substantially all of the nucleotides of an iRNA are modified, i.e., not more than 5, 4, 3, 2, or 1 unmodified nucleotides are present in a strand of the iRNA.

[0176] The nucleic acids featured in the invention can be synthesized or modified by methods well established in the art, such as those described in “Current protocols in nucleic acid chemistry.” Beaucage, S. L. et al. (Edrs.), John Wiley & Sons, Inc., New York, NY, USA, which is hereby incorporated herein by reference. Modifications include, for example, end modifications, e.g., 5′-end modifications (phosphorylation, conjugation, inverted linkages) or 3′-end modifications (conjugation, DNA nucleotides, inverted linkages, etc.); base modifications, e.g., replacement with stabilizing bases, destabilizing bases, or bases that base pair with an expanded repertoire of partners, removal of bases (abasic nucleotides), or conjugated bases; sugar modifications (e.g., at the 2′-position or 4′-position) or replacement of the sugar; or backbone modifications, including modification or replacement of the phosphodiester linkages. Specific examples of iRNA compounds useful in the embodiments described herein include, but are not limited to RNAs containing modified backbones or no natural internucleoside linkages. RNAs having modified backbones include, among others, those that do not have a phosphorus atom in the backbone. For the purposes of this specification, and as sometimes referenced in the art, modified RNAs that do not have a phosphorus atom in their internucleoside backbone can also be considered to be oligonucleosides. In some embodiments, a modified iRNA will have a phosphorus atom in its internucleoside backbone.

[0177] Modified RNA backbones include, for example, phosphorothioates, chiral phosphorothioates, phosphorodithioates, phosphotriesters, aminoalkylphosphotriesters, methyl and other alkyl phosphonates including 3′-alkylene phosphonates and chiral phosphonates, phosphinates, phosphoramidates including 3′-amino phosphoramidate and aminoalkylphosphoramidates, thionophosphoramidates, thionoalkylphosphonates, thionoalkylphosphotriesters, and boranophosphates having normal 3′-5′ linkages, 2′-5′-linked analogs of these, and those having inverted polarity wherein the adjacent pairs of nucleoside units are linked 3′-5′ to 5′-3′ or 2′-5′ to 5′-2′. Various salts, mixed salts and free acid forms are also included. In some embodiments of the invention, the dsRNA agents of the invention are in a free acid form. In other embodiments of the invention, the dsRNA agents of the invention are in a salt form. In one embodiment, the dsRNA agents of the invention are in a sodium salt form. In certain embodiments, when the dsRNA agents of the invention are in the sodium salt form, sodium ions are present in the agent as counterions for substantially all of the phosphodiester and/or phosphorothiotate groups present in the agent. Agents in which substantially all of the phosphodiester and/or phosphorothioate linkages have a sodium counterion include not more than 5, 4, 3, 2, or 1 phosphodiester and/or phosphorothioate linkages without a sodium counterion. In some embodiments, when the dsRNA agents of the invention are in the sodium salt form, sodium ions are present in the agent as counterions for all of the phosphodiester and/or phosphorothiotate groups present in the agent.

[0178] Representative U.S. Patents that teach the preparation of the above phosphorus-containing linkages include, but are not limited to, U.S. Pat. Nos. 3,687,808; 4,469,863; 4,476,301; 5,023,243; 5,177,195; 5,188,897; 5,264,423; 5,276,019; 5,278,302; 5,286,717; 5,321,131; 5,399,676; 5,405,939; 5,453,496; 5,455,233; 5,466,677; 5,476,925; 5,519,126; 5,536,821; 5,541,316; 5,550,111; 5,563,253; 5,571,799; 5,587,361; 5,625,050; 6,028,188; 6,124,445; 6,160,109; 6,169,170; 6,172,209; 6, 239,265; 6,277,603; 6,326,199; 6,346,614; 6,444,423; 6,531,590; 6,534,639; 6,608,035; 6,683,167; 6,858,715; 6,867,294; 6,878,805; 7,015,315; 7,041,816; 7,273,933; 7,321,029; and U.S. Pat. RE39464, the entire contents of each of which are hereby incorporated herein by reference.

[0179] Modified RNA backbones that do not include a phosphorus atom therein have backbones that are formed by short chain alkyl or cycloalkyl internucleoside linkages, mixed heteroatoms and alkyl or cycloalkyl internucleoside linkages, or one or more short chain heteroatomic or heterocyclic internucleoside linkages. These include those having morpholino linkages (formed in part from the sugar portion of a nucleoside); siloxane backbones; sulfide, sulfoxide and sulfone backbones; formacetyl and thioformacetyl backbones; methylene formacetyl and thioformacetyl backbones; alkene containing backbones; sulfamate backbones; methylencimino and methylenehydrazino backbones; sulfonate and sulfonamide backbones; amide backbones; and others having mixed N, O, S, and CH₂ component parts.

[0180] Representative U.S. Patents that teach the preparation of the above oligonucleosides include, but are not limited to, U.S. Pat. Nos. 5,034,506; 5,166,315; 5,185,444; 5,214,134; 5,216,141; 5,235,033; 5,64,562; 5,264,564; 5,405,938; 5,434,257; 5,466,677; 5,470,967; 5,489,677; 5,541,307; 5,561,225; 5,596,086; 5,602,240; 5,608,046; 5,610,289; 5,618,704; 5,623,070; 5,663,312; 5,633,360; 5,677,437; and 5,677,439, the entire contents of each of which are hereby incorporated herein by reference.

[0181] Suitable RNA mimetics are contemplated for use in iRNAs provided herein, in which both the sugar and the internucleoside linkage, i.e., the backbone, of the nucleotide units are replaced with novel groups. The base units are maintained for hybridization with an appropriate nucleic acid target compound. One such oligomeric compound in which an RNA mimetic that has been shown to have excellent hybridization properties is referred to as a peptide nucleic acid (PNA). In PNA compounds, the sugar backbone of an RNA is replaced with an amide containing backbone, in particular an aminoethylglycine backbone. The nucleobases are retained and are bound directly or indirectly to aza nitrogen atoms of the amide portion of the backbone. Representative US patents that teach the preparation of PNA compounds include, but are not limited to, U.S. Pat. Nos. 5,539,082; 5,714,331; and 5,719,262, the entire contents of each of which are hereby incorporated herein by reference. Additional PNA compounds suitable for use in the iRNAs of the invention are described in, for example, in Nielsen et al., Science, 1991, 254, 1497-1500.

[0182] Some embodiments featured in the invention include RNAs with phosphorothioate backbones and oligonucleosides with heteroatom backbones, and in particular —CH₂—NH—CH₂—, —CH₂—N(CH₃)—O—CH₂— [known as a methylene (methylimino) or MMI backbone], —CH₂—O—N(CH₃)—CH₂—, —CH₂—N(CH₃)—N(CH₃)—CH>— and —N(CH₃)—CH₂—CH₂— of the above-referenced U.S. Pat. No. 5,489,677, and the amide backbones of the above-referenced U.S. Pat. No. 5,602,240. In some embodiments, the RNAs featured herein have morpholino backbone structures of the above-referenced U.S. Pat. No. 5,034,506. The native phosphodiester backbone can be represented as O—P(O)(OH)—OCH₂—.

[0183] Modified RNAs can also contain one or more substituted sugar moieties. The iRNAs, e.g., dsRNAs, featured herein can include one of the following at the 2′-position: OH; F; O-, S-, or N-alkyl; O-, S-, or N-alkenyl; O-, S- or N-alkynyl; or O-alkyl-O-alkyl, wherein the alkyl, alkenyl and alkynyl can be substituted or unsubstituted C₁ to C₁₀ alkyl or C₂ to C₁₀ alkenyl and alkynyl. Exemplary suitable modifications include O[(CH₂)ₙO]ₘCH₃, O(CH₂)ₙOCH₃, O(CH₂), NH₂, O(CH₂)ₙCH₃, O(CH₂)ₙONH₂, and O(CH₂)ON[(CH₂)ₙCH₃)]₂, where n and m are from 1 to about 10. In other embodiments, dsRNAs include one of the following at the 2′ position: C₁ to C₁₀ lower alkyl, substituted lower alkyl, alkaryl, aralkyl, O-alkaryl or O-aralkyl, SH, SCH₃, OCN, Cl, Br, CN, CF₃, OCF₃, SOCH₃, SO₂CH₃, ONO₂, N₃, NH₂, heterocycloalkyl, heterocycloalkaryl, aminoalkylamino, polyalkylamino, substituted silyl, an RNA cleaving group, a reporter group, an intercalator, a group for improving the pharmacokinetic properties of an iRNA, or a group for improving the pharmacodynamic properties of an iRNA, and other substituents having similar properties. In some embodiments, the modification includes a 2′-methoxyethoxy (2′-O—CH₂CH₂OCH₃, also known as 2′-O-(2-methoxyethyl) or 2′-MOE) (Martin et al., Helv. Chim. Acta, 1995, 78:486-504) i.e., an alkoxy-alkoxy group. Another exemplary modification is 2′-dimethylaminooxyethoxy, i.e., a O(CH₂)₂ON(CH₃)₂ group, also known as 2′-DMAOE, as described in examples herein below, and 2′-dimethylaminocthoxyethoxy (also known in the art as 2′-O-dimethylaminocthoxyethyl or 2′-DMAEOE), i.e., 2′-O—CH₂—O—CH₂—N(CH₃)₂. Further exemplary modifications include: 5′-Me-2′-F nucleotides, 5′-Me-2′-OMe nucleotides, 5′-Me-2′-deoxynucleotides, (both R and S isomers in these three families); 2′-alkoxyalkyl; and 2′-NMA (N-methylacetamide).

[0184] Other modifications include 2′-methoxy (2′-OCH₃), 2′-aminopropoxy (2′-OCH₂CH₂CH₂NH₂) and 2′-fluoro (2′-F). Similar modifications can also be made at other positions on the RNA of an iRNA, particularly the 3′ position of the sugar on the 3′ terminal nucleotide or in 2′-5′ linked dsRNAs and the 5′ position of 5′ terminal nucleotide. iRNAs can also have sugar mimetics such as cyclobutyl moieties in place of the pentofuranosyl sugar. Representative US patents that teach the preparation of such modified sugar structures include, but are not limited to, U.S. Pat. Nos. 4,981,957; 5,118,800; 5,319,080; 5,359,044; 5,393,878; 5,446,137; 5,466,786; 5,514,785; 5,519,134; 5,567,811; 5,576,427; 5,591,722; 5,597,909; 5,610,300; 5,627,053; 5,639,873; 5,646,265; 5,658,873; 5,670,633; and 5,700,920, certain of which are commonly owned with the instant application. The entire contents of each of the foregoing are hereby incorporated herein by reference.

[0185] An iRNA can also include nucleobase (often referred to in the art simply as “base”) modifications or substitutions. As used herein, “unmodified” or “natural” nucleobases include the purine bases adenine (A) and guanine (G), and the pyrimidine bases thymine (T), cytosine (C), and uracil (U). Modified nucleobases include other synthetic and natural nucleobases such as deoxythimidine (dT), 5-methylcytosine (5-me-C), 5-hydroxymethyl cytosine, xanthine, hypoxanthine, 2-aminoadenine, 6-methyl and other alkyl derivatives of adenine and guanine, 2-propyl and other alkyl derivatives of adenine and guanine, 2-thiouracil, 2-thiothymine and 2-thiocytosine, 5-halouracil and cytosine. 5-propynyl uracil and cytosine, 6-azo uracil, cytosine and thymine, 5-uracil (pseudouracil), 4-thiouracil, 8-halo, 8-amino, 8-thiol, 8-thioalkyl, 8-hydroxyl anal other 8-substituted adenines and guanines. 5-halo, particularly 5-bromo, 5-trifluoromethyl and other 5-substituted uracils and cytosines, 7-methylguanine and 7-methyladenine, 8-azaguanine and 8-azaadenine, 7-deazaguanine and 7-daazaadenine and 3-deazaguanine and 3-deazaadenine. Further nucleobases include those disclosed in U.S. Pat. No. 3,687,808, those disclosed in Modified Nucleosides in Biochemistry, Biotechnology and Medicine, Herdewijn, P. ed. Wiley-VCH, 2008; those disclosed in The Concise Encyclopedia Of Polymer Science And Engineering, pages 858-859, Kroschwitz, J. L. ed. John Wiley & Sons, 1990, these disclosed by Englisch et al., Angewandte Chemie, International Edition, 1991, 30, 613, and those disclosed by Sanghvi, Y S., Chapter 15, dsRNA Research and Applications, pages 289-302, Crooke, S. T. and Lebleu, B., Ed., CRC Press, 1993. Certain of these nucleobases are particularly useful for increasing the binding affinity of the oligomeric compounds featured in the invention. These include 5-substituted pyrimidines, 6-azapyrimidines and N-2, N-6 and 0-6 substituted purines, including 2-aminopropyladenine, 5-propynyluracil and 5-propynylcytosine. 5-methylcytosine substitutions have been shown to increase nucleic acid duplex stability by 0.6-1.2° C. (Sanghvi, Y. S., Crooke, S. T. and Lebleu, B., Eds., dsRNA Research and Applications, CRC Press, Boca Raton, 1993, pp. 276-278) and are exemplary base substitutions, even more particularly when combined with 2′-O-methoxyethyl sugar modifications.

[0186] Representative U.S. Patents that teach the preparation of certain of the above noted modified nucleobases as well as other modified nucleobases include, but are not limited to, the above noted U.S. Pat. Nos. 3,687,808, 4,845,205; 5,130,30; 5,134,066; 5,175,273; 5,367,066; 5,432,272; 5,457,187; 5,459,255; 5,484,908; 5,502,177; 5,525,711; 5,552,540; 5,587,469; 5,594,121, 5,596,091; 5,614,617; 5,681,941; 5,750,692; 6,015,886; 6,147,200; 6,166,197; 6,222,025; 6,235,887; 6,380,368; 6,528,640; 6,639,062; 6,617,438; 7,045,610; 7,427,672; and 7,495,088, the entire contents of each of which are hereby incorporated herein by reference.

[0187] In some embodiments, an RNAi agent of the disclosure can also be modified to include one or more bicyclic sugar moieties. A “bicyclic sugar” is a furanosyl ring modified by a ring formed by the bridging of two carbons, whether adjacent or non-adjacent. A “bicyclic nucleoside” (“BNA”) is a nucleoside having a sugar moiety comprising a ring formed by bridging two carbons, whether adjacent or non-adjacent, of the sugar ring, thereby forming a bicyclic ring system. In certain embodiments, the bridge connects the 4′-carbon and the 2′-carbon of the sugar ring, optionally, via the 2′-acyclic oxygen atom. Thus, in some embodiments an agent of the invention may include one or more locked nucleic acids (LNA). A locked nucleic acid is a nucleotide having a modified ribose moiety in which the ribose moiety comprises an extra bridge connecting the 2′ and 4′ carbons. In other words, an LNA is a nucleotide comprising a bicyclic sugar moiety comprising a 4′-CH₂—O-2′ bridge. This structure effectively “locks” the ribose in the 3′-endo structural conformation. The addition of locked nucleic acids to siRNAs has been shown to increase siRNA stability in serum, and to reduce off-target effects (Elmen, J. et al., (2005) Nucleic Acids Research 33 (1): 439-447; Mook, O R. et al., (2007) Mol Canc Ther 6 (3): 833-843; Grunweller, A. et al., (2003) Nucleic Acids Research 31 (12): 3185-3193). Examples of bicyclic nucleosides for use in the polynucleotides of the invention include without limitation nucleosides comprising a bridge between the 4′ and the 2′ ribosyl ring atoms. In certain embodiments, the antisense polynucleotide agents of the invention include one or more bicyclic nucleosides comprising a 4′ to 2′ bridge.

[0188] A locked nucleoside can be represented by the structure (omitting stereochemistry),

[chemical structure]

[0189] wherein B is a nucleobase or modified nucleobase and L is the linking group that joins the 2′-carbon to the 4′-carbon of the ribose ring. Examples of such 4′ to 2′ bridged bicyclic nucleosides, include but are not limited to 4′-(CH₂)—O-2′ (LNA); 4′-(CH₂)—S-2′; 4′-(CH₂)₂—O-2′ (ENA); 4′-CH(CH₃)—O-2′ (also referred to as “constrained ethyl” or “cEt”) and 4′-CH(CH₂OCH₃)—O-2′ (and analogs thereof; see, e.g., U.S. Pat. No. 7,399,845); 4′-C(CH₃) (CH₃)—O-2′ (and analogs thereof; see e.g., U.S. Pat. No. 8,278,283); 4′-CH₂—N(OCH₃)-2′ (and analogs thereof; see e.g., U.S. Pat. No. 8,278,425); 4′-CH₂—O—N(CH₃)-2′ (see, e.g., U.S. Patent Publication No. 2004/0171570); 4′-CH₂—N(R)—O-2′, wherein R is H, C1-C12 alkyl, or a nitrogen protecting group (see, e.g., U.S. U.S. Pat. No. 7,427,672); 4′-CH₂—C(H)(CH₃)-2′ (see, e.g., Chattopadhyaya et al., J. Org. Chem., 2009, 74, 118-134); and 4′-CH₂—C(═CH₂)-2′ (and analogs thereof; see, e.g., U.S. Pat. No. 8,278,426). The entire contents of each of the foregoing are hereby incorporated herein by reference.

[0190] Additional representative U.S. Patents and U.S. Patent Publications that teach the preparation of locked nucleic acid nucleotides include, but are not limited to, the following: U.S. Pat. Nos. 6,268,490; 6,525,191; 6,670,461; 6,770,748; 6,794,499; 6,998,484; 7,053,207; 7,034,133; 7,084,125; 7,399,845; 7,427,672; 7,569,686; 7,741,457; 8,022,193; 8,030,467; 8,278,425; 8,278,426; 8,278,283; US 2008/0039618; and US 2009/0012281, the entire contents of each of which are hereby incorporated herein by reference.

[0191] Any of the foregoing bicyclic nucleosides can be prepared having one or more stereochemical sugar configurations including for example α-L-ribofuranose and β-D-ribofuranose (see WO 99/14226).

[0192] The RNA of an iRNA can also be modified to include one or more constrained ethyl nucleotides. As used herein, a “constrained ethyl nucleotide” or “cEt” is a locked nucleic acid comprising a bicyclic sugar moiety comprising a 4′-CH(CH₃)—O-2′ bridge (i.e., L in the preceding structure). In one embodiment, a constrained ethyl nucleotide is in the S conformation referred to herein as “S-cEt.”

[0193] An iRNA of the invention may also include one or more “conformationally restricted nucleotides” (“CRN”). CRN are nucleotide analogs with a linker connecting the C2′ and C4′ carbons of ribose or the C3 and −C5′ carbons of ribose. CRN lock the ribose ring into a stable conformation and increase the hybridization affinity to mRNA. The linker is of sufficient length to place the oxygen in an optimal position for stability and affinity resulting in less ribose ring puckering.

[0194] Representative publications that teach the preparation of certain of the above noted CRN include, but are not limited to, U.S. Patent Publication No. 2013/0190383; and PCT publication WO 2013/036868, the entire contents of each of which are hereby incorporated herein by reference.

[0195] In some embodiments, an iRNA of the invention comprises one or more monomers that are UNA (unlocked nucleic acid) nucleotides. UNA is unlocked acyclic nucleic acid, wherein any of the bonds of the sugar has been removed, forming an unlocked “sugar” residue. In one example, UNA also encompasses monomer with bonds between C1′-C4′ have been removed (i.e. the covalent carbon-oxygen-carbon bond between the C1′ and C4′ carbons). In another example, the C2′-C3′ bond (i.e. the covalent carbon-carbon bond between the C2′ and C3′ carbons) of the sugar has been removed (see Nuc. Acids Symp. Series, 52, 133-134 (2008) and Fluiter et al., Mol. Biosyst., 2009, 10, 1039 hereby incorporated by reference).

[0196] Representative U.S. publications that teach the preparation of UNA include, but are not limited to, U.S. Pat. No. 8,314,227; and U.S. Patent Publication Nos. 2013/0096289; 2013/0011922; and 2011/0313020, the entire contents of each of which are hereby incorporated herein by reference.

[0197] Potentially stabilizing modifications to the ends of RNA molecules can include N-(acetylaminocaproyl)-4-hydroxyprolinol (Hyp-C6-NHAc), N-(caproyl-4-hydroxyprolinol (Hyp-C6), N-(acetyl-4-hydroxyprolinol (Hyp-NHAc), thymidine-2′-O-deoxythymidine (ether), N-(aminocaproyl)-4-hydroxyprolinol (Hyp-C6-amino), 2-docosanoyl-uridine-3′-phosphate, inverted 2′-deoxy-modified ribonucleotide, such as inverted dT (idT), inverted dA (idA), and inverted abasic 2′-deoxyribonucleotide (iAb) and others. Disclosure of this modification can be found in WO 2011/005861.

[0198] In one example, the 3′ or 5′ terminal end of a oligonucleotide is linked to an inverted 2′-deoxy-modified ribonucleotide, such as inverted dT (idT), inverted dA (idA), or a inverted abasic 2′-deoxyribonucleotide (iAb). In one particular example, the inverted 2′-deoxy-modified ribonucleotide is linked to the 3′ end of an oligonucleotide, such as the 3′-end of a sense strand described herein, where the linking is via a 3′-3′ phosphodiester linkage or a 3′-3′-phosphorothioate linkage.

[0199] In another example, the 3′-end of a sense strand is linked via a 3′-3′-phosphorothioate linkage to an inverted abasic ribonucleotide (iAb). In another example, the 3′-end of a sense strand is linked via a 3′-3′-phosphorothioate linkage to an inverted dA (idA).

[0200] In one particular example, the inverted 2′-deoxy-modified ribonucleotide is linked to the 3′ end of an oligonucleotide, such as the 3′-end of a sense strand described herein, where the linking is via a 3′-3′ phosphodiester linkage or a 3′-3′-phosphorothioate linkage.

[0201] In another example, the 3′-terminal nucleotides of a sense strand is an inverted dA (idA) and is linked to the preceding nucleotide via a 3′-3′-linkage (e.g., 3′-3′-phosphorothioate linkage).

[0202] Other modifications of the nucleotides of an iRNA of the invention include a 5′ phosphate or 5′ phosphate mimic, e.g., a 5′-terminal phosphate or phosphate mimic on the antisense strand of an iRNA. Suitable phosphate mimics are disclosed in, for example U.S. Patent Publication No. 2012/0157511, the entire contents of which are incorporated herein by reference.

A. Modified iRNAs Comprising Motifs of the Invention

[0203] In certain aspects of the invention, the double stranded RNA agents of the invention include agents with chemical modifications as disclosed, for example, in WO2013/075035, the entire contents of each of which are incorporated herein by reference. As shown herein and in WO2013/075035, one or more motifs of three identical modifications on three consecutive nucleotides may be introduced into a sense strand or antisense strand of a dsRNAi agent, particularly at or near the cleavage site. In some embodiments, the sense strand and antisense strand of the dsRNAi agent may otherwise be completely modified. The introduction of these motifs interrupts the modification pattern, if present, of the sense or antisense strand. The dsRNAi agent may be optionally conjugated with a GalNAc derivative ligand, for instance on the sense strand.

[0204] More specifically, when the sense strand and antisense strand of the double stranded RNA agent are completely modified to have one or more motifs of three identical modifications on three consecutive nucleotides at or near the cleavage site of at least one strand of a dsRNAi agent, the gene silencing activity of the dsRNAi agent was observed.

[0205] Accordingly, the invention provides double stranded RNA agents capable of inhibiting the expression of a target gene (i.e., C3 gene) in vivo. The RNAi agent comprises a sense strand and an antisense strand. Each strand of the RNAi agent may be, for example, 17-30 nucleotides in length. 25-30 nucleotides in length, 27-30 nucleotides in length, 19-25 nucleotides in length, 19-23 nucleotides in length, 19-21 nucleotides in length, 21-25 nucleotides in length, or 21-23 nucleotides in length.

[0206] The sense strand and antisense strand typically form a duplex double stranded RNA (“dsRNA”), also referred to herein as “dsRNAi agent.” The duplex region of a dsRNAi agent may be, for example, the duplex region can be 27-30 nucleotide pairs in length, 19-25 nucleotide pairs in length, 19-23 nucleotide pairs in length, 19-21 nucleotide pairs in length, 21-25 nucleotide pairs in length, or 21-23 nucleotide pairs in length. In another example, the duplex region is selected from 19, 20, 21, 22, 23, 24, 25, 26, and 27 nucleotides in length.

[0207] In certain embodiments, the dsRNAi agent may contain one or more overhang regions or capping groups at the 3′-end, 5′-end, or both ends of one or both strands. The overhang can be, independently, 1-6 nucleotides in length, for instance 2-6 nucleotides in length, 1-5 nucleotides in length, 2-5 nucleotides in length, 1-4 nucleotides in length, 2-4 nucleotides in length, 1-3 nucleotides in length, 2-3 nucleotides in length, or 1-2 nucleotides in length. In certain embodiments, the overhang regions can include extended overhang regions as provided above. The overhangs can be the result of one strand being longer than the other, or the result of two strands of the same length being staggered. The overhang can form a mismatch with the target mRNA or it can be complementary to the gene sequences being targeted or can be another sequence. The first and second strands can also be joined, e.g., by additional bases to form a hairpin, or by other non-base linkers.

[0208] In certain embodiments, the nucleotides in the overhang region of the dsRNAi agent can each independently be a modified or unmodified nucleotide including, but no limited to 2′-sugar modified, such as, 2′-F, 2′-O-methyl, thymidine (T), 2′-O-methoxyethyl-5-methyluridine (Teo), 2′-O-methoxyethyladenosine (Aco), 2′-O-methoxyethyl-5-methylcytidine (m5Ceo), and any combinations thereof.

[0209] For example, TT can be an overhang sequence for either end on either strand. The overhang can form a mismatch with the target mRNA or it can be complementary to the gene sequences being targeted or can be another sequence.

[0210] The 5′- or 3′-overhangs at the sense strand, antisense strand, or both strands of the dsRNAi agent may be phosphorylated. In some embodiments, the overhang region(s) contains two nucleotides having a phosphorothioate between the two nucleotides, where the two nucleotides can be the same or different. In some embodiments, the overhang is present at the 3′-end of the sense strand, antisense strand, or both strands. In some embodiments, this 3′-overhang is present in the antisense strand. In some embodiments, this 3′-overhang is present in the sense strand.

[0211] The dsRNAi agent may contain only a single overhang, which can strengthen the interference activity of the RNAi, without affecting its overall stability. For example, the single-stranded overhang may be located at the 3′-end of the sense strand or, alternatively, at the 3′-end of the antisense strand. The RNAi may also have a blunt end, located at the 5′-end of the antisense strand (i.e., the 3′-end of the sense strand) or vice versa. Generally, the antisense strand of the dsRNAi agent has a nucleotide overhang at the 3′-end, and the 5′-end is blunt. While not wishing to be bound by theory, the asymmetric blunt end at the 5′-end of the antisense strand and 3′-end overhang of the antisense strand favor the guide strand loading into RISC process.

[0212] In certain embodiments, the dsRNAi agent is a double blunt-ended of 19 nucleotides in length, wherein the sense strand contains at least one motif of three 2′-F modifications on three consecutive nucleotides at positions 7, 8, 9 from the 5′ end. The antisense strand contains at least one motif of three 2′-O-methyl modifications on three consecutive nucleotides at positions 11, 12, and 13 from the 5′ end.

[0213] In other embodiments, the dsRNAi agent is a double blunt-ended of 20 nucleotides in length, wherein the sense strand contains at least one motif of three 2′-F modifications on three consecutive nucleotides at positions 8, 9, and 10 from the 5′ end. The antisense strand contains at least one motif of three 2′-O-methyl modifications on three consecutive nucleotides at positions 11, 12, and 13 from the 5′ end.

[0214] In yet other embodiments, the dsRNAi agent is a double blunt-ended of 21 nucleotides in length, wherein the sense strand contains at least one motif of three 2′-F modifications on three consecutive nucleotides at positions 9, 10, and 11 from the 5′ end. The antisense strand contains at least one motif of three 2′-O-methyl modifications on three consecutive nucleotides at positions 11, 12, and 13 from the 5′ end.

[0215] In certain embodiments, the dsRNAi agent comprises a 21 nucleotide sense strand and a 23 nucleotide antisense strand, wherein the sense strand contains at least one motif of three 2′-F modifications on three consecutive nucleotides at positions 9, 10, and 11 from the 5′ end; the antisense strand contains at least one motif of three 2′-O-methyl modifications on three consecutive nucleotides at positions 11, 12, and 13 from the 5′ end, wherein one end of the RNAi agent is blunt, while the other end comprises a 2 nucleotide overhang. In one embodiment, the 2 nucleotide overhang is at the 3′-end of the antisense strand.

[0216] When the 2 nucleotide overhang is at the 3′-end of the antisense strand, there may be two phosphorothioate internucleotide linkages between the terminal three nucleotides, wherein two of the three nucleotides are the overhang nucleotides, and the third nucleotide is a paired nucleotide next to the overhang nucleotide. In one embodiment, the RNAi agent additionally has two phosphorothioate internucleotide linkages between the terminal three nucleotides at both the 5′-end of the sense strand and at the 5′-end of the antisense strand. In certain embodiments, every nucleotide in the sense strand and the antisense strand of the dsRNAi agent, including the nucleotides that are part of the motifs are modified nucleotides. In certain embodiments each residue is independently modified with a 2′-O-methyl or 3′-fluoro, e.g., in an alternating motif. Optionally, the dsRNAi agent further comprises a ligand (such as, GalNAc₃).

[0217] In certain embodiments, the dsRNAi agent comprises a sense and an antisense strand, wherein the sense strand is 25-30 nucleotide residues in length, wherein starting from the 5′ terminal nucleotide (position 1) positions 1 to 23 of the first strand comprise at least 8 ribonucleotides; the antisense strand is 36-66 nucleotide residues in length and, starting from the 3′ terminal nucleotide, comprises at least 8 ribonucleotides in the positions paired with positions 1-23 of sense strand to form a duplex; wherein at least the 3 ‘terminal nucleotide of antisense strand is unpaired with sense strand, and up to 6 consecutive 3’ terminal nucleotides are unpaired with sense strand, thereby forming a 3′ single stranded overhang of 1-6 nucleotides; wherein the 5′ terminus of antisense strand comprises from 10-30 consecutive nucleotides which are unpaired with sense strand, thereby forming a 10-30 nucleotide single stranded 5′ overhang; wherein at least the sense strand 5′ terminal and 3′ terminal nucleotides are base paired with nucleotides of antisense strand when sense and antisense strands are aligned for maximum complementarity, thereby forming a substantially duplexed region between sense and antisense strands; and antisense strand is sufficiently complementary to a target RNA along at least 19 ribonucleotides of antisense strand length to reduce target gene expression when the double stranded nucleic acid is introduced into a mammalian cell; and wherein the sense strand contains at least one motif of three 2′-F modifications on three consecutive nucleotides, where at least one of the motifs occurs at or near the cleavage site. The antisense strand contains at least one motif of three 2′-O-methyl modifications on three consecutive nucleotides at or near the cleavage site.

[0218] In certain embodiments, the dsRNAi agent comprises sense and antisense strands, wherein the dsRNAi agent comprises a first strand having a length which is at least 25 and at most 29 nucleotides and a second strand having a length which is at most 30 nucleotides with at least one motif of three 2′-O-methyl modifications on three consecutive nucleotides at position 11, 12, 13 from the 5′ end; wherein the 3′ end of the first strand and the 5′ end of the second strand form a blunt end and the second strand is 1-4 nucleotides longer at its 3′ end than the first strand, wherein the duplex region which is at least 25 nucleotides in length, and the second strand is sufficiently complementary to a target mRNA along at least 19 nucleotide of the second strand length to reduce target gene expression when the RNAi agent is introduced into a mammalian cell, and wherein Dicer cleavage of the dsRNAi agent results in an siRNA comprising the 3′-end of the second strand, thereby reducing expression of the target gene in the mammal. Optionally, the dsRNAi agent further comprises a ligand.

[0219] In certain embodiments, the sense strand of the dsRNAi agent contains at least one motif of three identical modifications on three consecutive nucleotides, where one of the motifs occurs at the cleavage site in the sense strand.

[0220] In certain embodiments, the antisense strand of the dsRNAi agent can also contain at least one motif of three identical modifications on three consecutive nucleotides, where one of the motifs occurs at or near the cleavage site in the antisense strand.

[0221] For a dsRNAi agent having a duplex region of 19-23 nucleotides in length, the cleavage site of the antisense strand is typically around the 10, 11, and 12 positions from the 5′-end. Thus the motifs of three identical modifications may occur at the 9, 10, 11 positions; the 10, 11, 12 positions; the 11, 12, 13 positions; the 12, 13, 14 positions; or the 13, 14, 15 positions of the antisense strand, the count starting from the first nucleotide from the 5′-end of the antisense strand, or, the count starting from the first paired nucleotide within the duplex region from the 5′-end of the antisense strand. The cleavage site in the antisense strand may also change according to the length of the duplex region of the dsRNAi agent from the 5′-end.

[0222] The sense strand of the dsRNAi agent may contain at least one motif of three identical modifications on three consecutive nucleotides at the cleavage site of the strand; and the antisense strand may have at least one motif of three identical modifications on three consecutive nucleotides at or near the cleavage site of the strand. When the sense strand and the antisense strand form a dsRNA duplex, the sense strand and the antisense strand can be so aligned that one motif of the three nucleotides on the sense strand and one motif of the three nucleotides on the antisense strand have at least one nucleotide overlap, i.e., at least one of the three nucleotides of the motif in the sense strand forms a base pair with at least one of the three nucleotides of the motif in the antisense strand. Alternatively, at least two nucleotides may overlap, or all three nucleotides may overlap.

[0223] In some embodiments, the sense strand of the dsRNAi agent may contain more than one motif of three identical modifications on three consecutive nucleotides. The first motif may occur at or near the cleavage site of the strand and the other motifs may be a wing modification. The term “wing modification” herein refers to a motif occurring at another portion of the strand that is separated from the motif at or near the cleavage site of the same strand. The wing modification is either adjacent to the first motif or is separated by at least one or more nucleotides. When the motifs are immediately adjacent to each other then the chemistries of the motifs are distinct from each other, and when the motifs are separated by one or more nucleotide than the chemistries can be the same or different. Two or more wing modifications may be present. For instance, when two wing modifications are present, each wing modification may occur at one end relative to the first motif which is at or near cleavage site or on either side of the lead motif.

[0224] Like the sense strand, the antisense strand of the dsRNAi agent may contain more than one motif of three identical modifications on three consecutive nucleotides, with at least one of the motifs occurring at or near the cleavage site of the strand. This antisense strand may also contain one or more wing modifications in an alignment similar to the wing modifications that may be present on the sense strand.

[0225] In some embodiments, the wing modification on the sense strand or antisense strand of the dsRNAi agent typically does not include the first one or two terminal nucleotides at the 3′-end, 5′-end, or both ends of the strand.

[0226] In other embodiments, the wing modification on the sense strand or antisense strand of the dsRNAi agent typically does not include the first one or two paired nucleotides within the duplex region at the 3′-end, 5′-end, or both ends of the strand.

[0227] When the sense strand and the antisense strand of the dsRNAi agent each contain at least one wing modification, the wing modifications may fall on the same end of the duplex region, and have an overlap of one, two, or three nucleotides.

[0228] When the sense strand and the antisense strand of the dsRNAi agent each contain at least two wing modifications, the sense strand and the antisense strand can be so aligned that two modifications each from one strand fall on one end of the duplex region, having an overlap of one, two, or three nucleotides; two modifications each from one strand fall on the other end of the duplex region, having an overlap of one, two or three nucleotides; two modifications one strand fall on each side of the lead motif, having an overlap of one, two or three nucleotides in the duplex region.

[0229] In some embodiments, every nucleotide in the sense strand and antisense strand of the dsRNAi agent, including the nucleotides that are part of the motifs, may be modified. Each nucleotide may be modified with the same or different modification which can include one or more alteration of one or both of the non-linking phosphate oxygens or of one or more of the linking phosphate oxygens; alteration of a constituent of the ribose sugar, e.g., of the 2′-hydroxyl on the ribose sugar; wholesale replacement of the phosphate moiety with “dephospho” linkers; modification or replacement of a naturally occurring base; and replacement or modification of the ribose-phosphate backbone.

[0230] As nucleic acids are polymers of subunits, many of the modifications occur at a position which is repeated within a nucleic acid, e.g., a modification of a base, or a phosphate moiety, or a non-linking O of a phosphate moiety. In some cases the modification will occur at all of the subject positions in the nucleic acid but in many cases it will not. By way of example, a modification may only occur at a 3′- or 5′ terminal position, may only occur in a terminal region, e.g., at a position on a terminal nucleotide or in the last 2, 3, 4, 5, or 10 nucleotides of a strand. A modification may occur in a double strand region, a single strand region, or in both. A modification may occur only in the double strand region of an RNA or may only occur in a single strand region of a RNA. For example, a phosphorothioate modification at a non-linking O position may only occur at one or both termini, may only occur in a terminal region, e.g., at a position on a terminal nucleotide or in the last 2, 3, 4, 5, or 10 nucleotides of a strand, or may occur in double strand and single strand regions, particularly at termini. The 5′-end or ends can be phosphorylated.

[0231] It may be possible, e.g., to enhance stability, to include particular bases in overhangs, or to include modified nucleotides or nucleotide surrogates, in single strand overhangs, e.g., in a 5′- or 3′-overhang, or in both. For example, it can be desirable to include purine nucleotides in overhangs. In some embodiments all or some of the bases in a 3′- or 5′-overhang may be modified, e.g., with a modification described herein. Modifications can include, e.g., the use of modifications at the 2′ position of the ribose sugar with modifications that are known in the art, e.g., the use of deoxyribonucleotides, 2′-deoxy-2′-fluoro (2′-F) or 2′-O-methyl modified instead of the ribosugar of the nucleobase, and modifications in the phosphate group, e.g., phosphorothioate modifications. Overhangs need not be homologous with the target sequence.

[0232] In some embodiments, each residue of the sense strand and antisense strand is independently modified with LNA, CRN, CET, UNA, HNA, CeNA, 2′-methoxyethyl, 2′-O-methyl, 2′-O-allyl, 2′-C-allyl. 2′-deoxy, 2′-hydroxyl, or 2′-fluoro. The strands can contain more than one modification. In one embodiment, each residue of the sense strand and antisense strand is independently modified with 2′-O-methyl or 2′-fluoro.

[0233] At least two different modifications are typically present on the sense strand and antisense strand. Those two modifications may be the 2′-O-methyl or 2′-fluoro modifications, or others.

[0234] In certain embodiments, the Na or No comprise modifications of an alternating pattern. The term “alternating motif” as used herein refers to a motif having one or more modifications, each modification occurring on alternating nucleotides of one strand. The alternating nucleotide may refer to one per every other nucleotide or one per every three nucleotides, or a similar pattern. For example, if A. B and C each represent one type of modification to the nucleotide, the alternating motif can be “ABABABABABAB . . . ” “AABBAABBAABB . . . ” “AABAABAABAAB . . . ” “AAABAAABAAAB . . . ” “AAABBBAAABBB . . . ” or “ABCABCABCABC . . . ” etc.

[0235] The type of modifications contained in the alternating motif may be the same or different. For example, if A, B, C, D each represent one type of modification on the nucleotide, the alternating pattern, i.e., modifications on every other nucleotide, may be the same, but each of the sense strand or antisense strand can be selected from several possibilities of modifications within the alternating motif such as “ABABAB . . . “, “ACACAC . . . ” “BDBDBD . . . ” or “CDCDCD . . . ,” etc.

[0236] In some embodiments, the dsRNAi agent of the invention comprises the modification pattern for the alternating motif on the sense strand relative to the modification pattern for the alternating motif on the antisense strand is shifted. The shift may be such that the modified group of nucleotides of the sense strand corresponds to a differently modified group of nucleotides of the antisense strand and vice versa. For example, the sense strand when paired with the antisense strand in the dsRNA duplex, the alternating motif in the sense strand may start with “ABABAB” from 5′ to 3′ of the strand and the alternating motif in the antisense strand may start with “BABABA” from 5′ to 3′ of the strand within the duplex region. As another example, the alternating motif in the sense strand may start with “AABBAABB” from 5′ to 3′ of the strand and the alternating motif in the antisense strand may start with “BBAABBAA” from 5′ to 3′ of the strand within the duplex region, so that there is a complete or partial shift of the modification patterns between the sense strand and the antisense strand.

[0237] In one particular example, the alternating motif in the sense strand is “ABABAB” s from 5′ 3′ of the strand, where each A is an unmodified ribonucleotide and each B is a 2′-Omethyl modified nucleotide.

[0238] In one particular example, the alternating motif in the sense strand is “ABABAB” s from 5′ 3′ of the strand, where each A is an 2′-deoxy-2′-fluoro modified nucleotide and each B is a 2′-Omethyl modified nucleotide.

[0239] In another particular example, the alternating motif in the antisense strand is “BABABA” from 3′-5′ of the strand, where each A is a 2′-deoxy-2′-fluoro modified nucleotide and each B is a 2′-Omethyl modified nucleotide.

[0240] In one particular example, the alternating motif in the sense strand is “ABABAB” s from 5′ 3′ of the strand and the alternating motif in the antisense strand is “BABABA” from 3′-5′ of the strand, where each A is an unmodified ribonucleotide and each B is a 2′-Omethyl modified nucleotide. In one particular example, the alternating motif in the sense strand is “ABABAB” s from 5′ 3′ of the strand and the alternating motif in the antisense strand is “BABABA” from 3′-5′ of the strand, where each A is a 2′-deoxy-2′-fluoro modified nucleotide and each B is a 2′-Omethyl modified nucleotide.

[0241] In some embodiments, the dsRNAi agent comprises the pattern of the alternating motif of 2′-O-methyl modification and 2′-F modification on the sense strand initially has a shift relative to the pattern of the alternating motif of 2′-O-methyl modification and 2′-F modification on the antisense strand initially, i.e., the 2′-O-methyl modified nucleotide on the sense strand base pairs with a 2′-F modified nucleotide on the antisense strand and vice versa. The 1 position of the sense strand may start with the 2′-F modification, and the 1 position of the antisense strand may start with the 2′-O-methyl modification.

[0242] The introduction of one or more motifs of three identical modifications on three consecutive nucleotides to the sense strand or antisense strand interrupts the initial modification pattern present in the sense strand or antisense strand. This interruption of the modification pattern of the sense or antisense strand by introducing one or more motifs of three identical modifications on three consecutive nucleotides to the sense or antisense strand may enhance the gene silencing activity against the target gene.

[0243] In some embodiments, when the motif of three identical modifications on three consecutive nucleotides is introduced to any of the strands, the modification of the nucleotide next to the motif is a different modification than the modification of the motif. For example, the portion of the sequence containing the motif is “ . . . . NₐYYYN_{b} . . . ” where “Y” represents the modification of the motif of three identical modifications on three consecutive nucleotide, and “Nₐ” and “N_{b}” represent a modification to the nucleotide next to the motif “YYY” that is different than the modification of Y, and where Nₐ and N_{b} can be the same or different modifications. Alternatively. Nₐ or N_{b} may be present or absent when there is a wing modification present.

[0244] The iRNA may further comprise at least one phosphorothioate or methylphosphonate internucleotide linkage. The phosphorothioate or methylphosphonate internucleotide linkage modification may occur on any nucleotide of the sense strand, antisense strand, or both strands in any position of the strand. For instance, the internucleotide linkage modification may occur on every nucleotide on the sense strand or antisense strand; each internucleotide linkage modification may occur in an alternating pattern on the sense strand or antisense strand; or the sense strand or antisense strand may contain both internucleotide linkage modifications in an alternating pattern. The alternating pattern of the internucleotide linkage modification on the sense strand may be the same or different from the antisense strand, and the alternating pattern of the internucleotide linkage modification on the sense strand may have a shift relative to the alternating pattern of the internucleotide linkage modification on the antisense strand. In one embodiment, a double-stranded RNAi agent comprises 6-8 phosphorothioate internucleotide linkages. In some embodiments, the antisense strand comprises two phosphorothioate internucleotide linkages at the 5′-end and two phosphorothioate internucleotide linkages at the 3′-end, and the sense strand comprises at least two phosphorothioate internucleotide linkages at either the 5′-end or the 3′-end.

[0245] In some embodiments, the dsRNAi agent comprises a phosphorothioate or methylphosphonate internucleotide linkage modification in the overhang region. For example, the overhang region may contain two nucleotides having a phosphorothioate or methylphosphonate internucleotide linkage between the two nucleotides. Internucleotide linkage modifications also may be made to link the overhang nucleotides with the terminal paired nucleotides within the duplex region. For example, at least 2, 3, 4, or all the overhang nucleotides may be linked through phosphorothioate or methylphosphonate internucleotide linkage, and optionally, there may be additional phosphorothioate or methylphosphonate internucleotide linkages linking the overhang nucleotide with a paired nucleotide that is next to the overhang nucleotide. For instance, there may be at least two phosphorothioate internucleotide linkages between the terminal three nucleotides, in which two of the three nucleotides are overhang nucleotides, and the third is a paired nucleotide next to the overhang nucleotide. These terminal three nucleotides may be at the 3′-end of the antisense strand, the 3′-end of the sense strand, the 5′-end of the antisense strand, or the 5′ end of the antisense strand.

[0246] In some embodiments, the 2-nucleotide overhang is at the 3′-end of the antisense strand, and there are two phosphorothioate internucleotide linkages between the terminal three nucleotides, wherein two of the three nucleotides are the overhang nucleotides, and the third nucleotide is a paired nucleotide next to the overhang nucleotide. Optionally, the dsRNAi agent may additionally have two phosphorothioate internucleotide linkages between the terminal three nucleotides at both the 5′-end of the sense strand and at the 5′-end of the antisense strand.

[0247] In one embodiment, the dsRNAi agent comprises mismatch(es) with the target, within the duplex, or combinations thereof. The mismatch may occur in the overhang region or the duplex region. The base pair may be ranked on the basis of their propensity to promote dissociation or melting (e.g., on the free energy of association or dissociation of a particular pairing, the simplest approach is to examine the pairs on an individual pair basis, though next neighbor or similar analysis can also be used). In terms of promoting dissociation: A:U is preferred over G:C; G:U is preferred over G:C; and I:C is preferred over G:C (I=inosine). Mismatches, e.g., non-canonical or other than canonical pairings (as described elsewhere herein) are preferred over canonical (A:T, A:U, G:C) pairings; and pairings which include a universal base are preferred over canonical pairings.

[0248] In certain embodiments, the dsRNAi agent comprises at least one of the first 1, 2, 3, 4, or 5 base pairs within the duplex regions from the 5′-end of the antisense strand independently selected from the group of: A:U, G:U, I:C, and mismatched pairs, e.g., non-canonical or other than canonical pairings or pairings which include a universal base, to promote the dissociation of the antisense strand at the 5′-end of the duplex.

[0249] In certain embodiments, the nucleotide at the 1 position within the duplex region from the 5′-end in the antisense strand is selected from A, dA, dU, U, and dT. Alternatively, at least one of the first 1, 2, or 3 base pair within the duplex region from the 5′-end of the antisense strand is an AU base pair. For example, the first base pair within the duplex region from the 5′-end of the antisense strand is an AU base pair.

[0250] In other embodiments, the nucleotide at the 3′-end of the sense strand is deoxythimidine (dT) or the nucleotide at the 3′-end of the antisense strand is deoxythimidine (dT). For example, there is a short sequence of deoxythimidine nucleotides, for example, two dT nucleotides on the 3′-end of the sense, antisense strand, or both strands.

[0251] In certain embodiments, the sense strand sequence may be represented by formula (I):

5′nₚ-Nₐ—(XXX)ᵢ—N_{b}—YYY—N_{b}—(ZZZ)ⱼ—Nₐ-n_{q}3′ (I)
[0252] wherein:
[0253] i and j are each independently 0 or 1;
[0254] p and q are each independently 0-6;
[0255] each Nₐ independently represents an oligonucleotide sequence comprising 0-25 modified nucleotides, each sequence comprising at least two differently modified nucleotides;
[0256] each N_{b} independently represents an oligonucleotide sequence comprising 0-10 modified nucleotides;
[0257] each nₚ and n_{q} independently represent an overhang nucleotide;
[0258] wherein N_{b} and Y do not have the same modification; and
[0259] XXX, YYY, and ZZZ each independently represent one motif of three identical modifications on three consecutive nucleotides. In one embodiment, YYY is all 2′-F modified nucleotides.

[0260] In some embodiments, the Nₐ or N_{b} comprises modifications of alternating pattern.

[0261] In some embodiments, the YYY motif occurs at or near the cleavage site of the sense strand. For example, when the dsRNAi agent has a duplex region of 17-23 nucleotides in length, the YYY motif can occur at or the vicinity of the cleavage site (e.g.: can occur at positions 6, 7, 8; 7, 8, 9; 8, 9, 10; 9, 10, 11; 10, 11,12; or 11, 12, 13) of the sense strand, the count starting from the first nucleotide, from the 5′-end; or optionally, the count starting at the first paired nucleotide within the duplex region, from the 5′-end.

[0262] In one embodiment, i is 1 and j is 0, or i is 0 and j is 1, or both i and j are 1. The sense strand can therefore be represented by the following formulas:

5′nₚ-Nₐ—YYY—N_{b}—ZZZ—Nₐ-n_{q}3′ (Ib);

5′nₚ-Nₐ—XXX—N_{b}—YYY—Nₐ-n_{q}3′ (Ic); or

5′nₚ-Nₐ—XXX—N_{b}—YYY—N_{b}—ZZZ—Nₐ-n_{q}3′ (Id).

[0263] When the sense strand is represented by formula (Ib), N_{b} represents an oligonucleotide sequence comprising 0-10, 0-7, 0-5, 0-4, 0-2, or 0 modified nucleotides. Each Nₐ independently can represent an oligonucleotide sequence comprising 2-20, 2-15, or 2-10 modified nucleotides.

[0264] When the sense strand is represented as formula (Ic), N_{b} represents an oligonucleotide sequence comprising 0-10, 0-7, 0-10, 0-7, 0-5, 0-4, 0-2, or 0 modified nucleotides. Each Nₐ can independently represent an oligonucleotide sequence comprising 2-20, 2-15, or 2-10 modified nucleotides.

[0265] When the sense strand is represented as formula (Id), each N_{b} independently represents an oligonucleotide sequence comprising 0-10, 0-7, 0-5, 0-4, 0-2, or 0 modified nucleotides. In one embodiment, N_{b} is 0, 1, 2, 3, 4, 5, or 6 Each Nₐ can independently represent an oligonucleotide sequence comprising 2-20, 2-15, or 2-10 modified nucleotides.

[0266] Each of X, Y and Z may be the same or different from each other.

[0267] In other embodiments, i is 0 and j is 0, and the sense strand may be represented by the formula:

5′nₚ-Nₐ—YYY—Nₐ-n_{q}3′ (Ia).

[0268] When the sense strand is represented by formula (Ia), each Nₐ independently can represent an oligonucleotide sequence comprising 2-20, 2-15, or 2-10 modified nucleotides.

[0269] In one embodiment, the antisense strand sequence of the RNAi may be represented by formula (II):

5′n_{q′}—Nₐ′—(Z′Z′Z′)ₖ—N_{b}′—Y′Y′Y′—N_{b}′—(X′X′X′)ₗ—N′ₐ-nₚ′3′ (II)
[0270] wherein:
[0271] k and l are each independently 0 or 1;
[0272] p′ and q′ are each independently 0-6;
[0273] each Nₐ′ independently represents an oligonucleotide sequence comprising 0-25 modified nucleotides, each sequence comprising at least two differently modified nucleotides;
[0274] each N_{b}′ independently represents an oligonucleotide sequence comprising 0-10 modified nucleotides;
[0275] each nₚ′ and n_{q}′ independently represent an overhang nucleotide;
[0276] wherein N_{b}′ and Y′ do not have the same modification; and
[0277] X′X′X′, Y′Y′Y′, and Z′Z′Z′ each independently represent one motif of three identical modifications on three consecutive nucleotides.

[0278] In some embodiments, the Nₐ′ or N_{b}′ comprises modifications of alternating pattern.

[0279] The Y′Y′Y′ motif occurs at or near the cleavage site of the antisense strand. For example, when the dsRNAi agent has a duplex region of 17-23 nucleotides in length, the Y′Y′Y′ motif can occur at positions 9, 10, 11; 10, 11, 12; 11, 12, 13; 12, 13, 14; or 13, 14, 15 of the antisense strand, with the count starting from the first nucleotide, from the 5′-end; or optionally, the count starting at the first paired nucleotide within the duplex region, from the 5′-end. In one embodiment, the Y′Y′Y′ motif occurs at positions 11, 12, 13.

[0280] In certain embodiments, Y′Y′Y′ motif is all 2′-OMe modified nucleotides.

[0281] In certain embodiments, k is 1 and l is 0, or k is 0 and l is 1, or both k and l are 1.

[0282] The antisense strand can therefore be represented by the following formulas:

5′n_{q′}—Nₐ′—Z′Z′Z′—N_{b}′—Y′Y′Y′—Nₐ′-nₚ′3′ (IIb);

5′n_{q′}—Nₐ′—Y′Y′Y′—N_{b}′—X′X′X′-n_{p′}3′ (IIc); or

5′n_{q′}—Nₐ′—Z′Z′Z′—N_{b}′—Y′Y′Y′—N_{b}′—X′X′X′—Nₐ′-n_{p′}3′ (IId).

[0283] When the antisense strand is represented by formula (IIb), N_{b} represents an oligonucleotide sequence comprising 0-10, 0-7, 0-10, 0-7, 0-5, 0-4, 0-2, or 0 modified nucleotides. Each Nₐ′ independently represents an oligonucleotide sequence comprising 2-20, 2-15, or 2-10 modified nucleotides.

[0284] When the antisense strand is represented as formula (IIc), N_{b}′ represents an oligonucleotide sequence comprising 0-10, 0-7, 0-10, 0-7, 0-5, 0-4, 0-2, or 0 modified nucleotides. Each Nₐ′ independently represents an oligonucleotide sequence comprising 2-20, 2-15, or 2-10 modified nucleotides.

[0285] When the antisense strand is represented as formula (IId), each N_{b}′ independently represents an oligonucleotide sequence comprising 0-10, 0-7, 0-10, 0-7, 0-5, 0-4, 0-2, or 0 modified nucleotides. Each Nₐ′ independently represents an oligonucleotide sequence comprising 2-20, 2-15, or 2-10 modified nucleotides. In one embodiment, N_{b} is 0, 1, 2, 3, 4, 5, or 6.

[0286] In other embodiments, k is 0 and l is 0 and the antisense strand may be represented by the formula:

5′n_{p′}—N_{a′}—Y′Y′Y′—N_{a′}-n_{q′}3′ (Ia).

[0287] When the antisense strand is represented as formula (IIa), each Nₐ′ independently represents an oligonucleotide sequence comprising 2-20, 2-15, or 2-10 modified nucleotides.

[0288] Each of X′, Y′ and Z′ may be the same or different from each other.

[0289] Each nucleotide of the sense strand and antisense strand may be independently modified with LNA, CRN, UNA, cEt, HNA, CeNA, 2′-methoxyethyl, 2′-O-methyl, 2′-O-allyl, 2′-C-allyl, 2′-hydroxyl, or 2′-fluoro. For example, each nucleotide of the sense strand and antisense strand is independently modified with 2′-O-methyl or 2′-fluoro. Each X, Y, Z, X′, Y′, and Z′, in particular, may represent a 2′-O-methyl modification or a 2′-fluoro modification.

[0290] In some embodiments, the sense strand of the dsRNAi agent may contain YYY motif occurring at 9, 10, and 11 positions of the strand when the duplex region is 21 nt, the count starting from the first nucleotide from the 5′-end, or optionally, the count starting at the first paired nucleotide within the duplex region, from the 5′-end; and Y represents 2′-F modification. The sense strand may additionally contain XXX motif or ZZZ motifs as wing modifications at the opposite end of the duplex region; and XXX and ZZZ each independently represents a 2′-OMe modification or 2′-F modification.

[0291] In some embodiments the antisense strand may contain Y′Y′Y′ motif occurring at positions 11, 12, 13 of the strand, the count starting from the first nucleotide from the 5′-end, or optionally, the count starting at the first paired nucleotide within the duplex region, from the 5′-end; and Y′ represents 2′-O-methyl modification. The antisense strand may additionally contain X′X′X′ motif or Z′Z′Z′ motifs as wing modifications at the opposite end of the duplex region; and X′X′X′ and Z′Z′Z′ each independently represents a 2′-OMe modification or 2′-F modification.

[0292] The sense strand represented by any one of the above formulas (Ia), (Ib), (Ic), and (Id) forms a duplex with an antisense strand being represented by any one of formulas (IIa), (IIb), (IIc), and (IId), respectively.

[0293] Accordingly, the dsRNAi agents for use in the methods of the invention may comprise a sense strand and an antisense strand, each strand having 14 to 30 nucleotides, the iRNA duplex represented by formula (III):

sense: 5′nₚ-Nₐ—(XXX)ᵢ—N_{b}—YYY—N_{b}—(ZZZ)ⱼ—Nₐ-n_{q}3′

antisense: 3′nₚ′—Nₐ′—(X′X′X′)ₖ—N_{b}′—Y′Y′Y′—N_{b}′—(Z′Z′Z′)ₗ—Nₐ′-n_{q}′5′ (III)
[0294] wherein:
[0295] i, j, k, and l are each independently 0 or 1;
[0296] p, p′, q, and q′ are each independently 0-6;
[0297] each Nₐ and Nₐ′ independently represents an oligonucleotide sequence comprising 0-25 modified nucleotides, each sequence comprising at least two differently modified nucleotides;
[0298] each N_{b} and N_{b}′ independently represents an oligonucleotide sequence comprising 0-10 modified nucleotides;
[0299] wherein each nₚ′, nₚ, n_{q}′, and n_{q}, each of which may or may not be present, independently represents an overhang nucleotide; and
[0300] XXX, YYY, ZZZ, X′X′X′, Y′Y′Y′, and Z′Z′Z′ each independently represent one motif of three identical modifications on three consecutive nucleotides.

[0301] In one embodiment, i is 0 and j is 0; or i is 1 and j is 0; or i is 0 and j is 1; or both i and j are 0; or both i and j are 1. In another embodiment, k is 0 and l is 0; or k is 1 and l is 0; k is 0 and l is 1; or both k and l are 0; or both k and l are 1.

[0302] Exemplary combinations of the sense strand and antisense strand forming an iRNA duplex include the formulas below:

5′nₚ-Nₐ—YYY—Nₐ-n_{q}3′

3′nₚ′—Nₐ′—Y′Y′Y′—Nₐ′n_{q}′5′ (IIIa)

5′nₚ-Nₐ—YYY—N_{b}—ZZZ—Nₐ-n_{q}3′

3′nₚ′—Nₐ′—Y′Y′Y′—N_{b}′—Z′Z′Z′—Nₐ′-n_{q}′5′ (IIIb)

5′nₚ-Nₐ—XXX—N_{b}—YYY—Nₐ-n_{q}3′

3′nₚ′—Nₐ′—X′X′X′—N_{b}′—Y′Y′Y′—Nₐ′-n_{q}′5′ (IIIc)

5′nₚ-Nₐ—XXX—N_{b}—YYY—N_{b}—ZZZ—Nₐ-n_{q}3′

3′nₚ′—Nₐ′—X′X′X′—N_{b}′—Y′Y′Y′—N_{b}′—Z′Z′Z′—Nₐ-n_{q}′5′ (IIId)

[0303] When the dsRNAi agent is represented by formula (IIIa), each Nₐ independently represents an oligonucleotide sequence comprising 2-20, 2-15, or 2-10 modified nucleotides.

[0304] When the dsRNAi agent is represented by formula (IIIb), each N_{b} independently represents an oligonucleotide sequence comprising 1-10, 1-7, 1-5, or 1-4 modified nucleotides. Each Nₐ independently represents an oligonucleotide sequence comprising 2-20, 2-15, or 2-10 modified nucleotides.

[0305] When the dsRNAi agent is represented as formula (IIIc), each N_{b}, N_{b}′ independently represents an oligonucleotide sequence comprising 0-10, 0-7, 0-10, 0-7, 0-5, 0-4, 0-2, or 0 modified nucleotides. Each Nₐ independently represents an oligonucleotide sequence comprising 2-20, 2-15, or 2-10 modified nucleotides.

[0306] When the dsRNAi agent is represented as formula (IIId), each N_{b}, N_{b}′ independently represents an oligonucleotide sequence comprising 0-10, 0-7, 0-10, 0-7, 0-5, 0-4, 0-2, or 0 modified nucleotides. Each Nₐ, Nₐ′ independently represents an oligonucleotide sequence comprising 2-20, 2-15, or 2-10 modified nucleotides. Each of Nₐ, Nₐ′, N_{b}, and N_{b} independently comprises modifications of alternating pattern.

[0307] Each of X, Y, and Z in formulas (III), (IIIa), (IIIb), (IIIc), and (IIId) may be the same or different from each other.

[0308] When the dsRNAi agent is represented by formula (III), (IIIa), (IIIb), (IIIc), and (IIId), at least one of the Y nucleotides may form a base pair with one of the Y′ nucleotides. Alternatively, at least two of the Y nucleotides form base pairs with the corresponding Y′ nucleotides; or all three of the Y nucleotides all form base pairs with the corresponding Y′ nucleotides.

[0309] When the dsRNAi agent is represented by formula (IIIb) or (IIId), at least one of the Z nucleotides may form a base pair with one of the Z′ nucleotides. Alternatively, at least two of the Z nucleotides form base pairs with the corresponding Z′ nucleotides; or all three of the Z nucleotides all form base pairs with the corresponding Z′ nucleotides.

[0310] When the dsRNAi agent is represented as formula (IIIc) or (IIId), at least one of the X nucleotides may form a base pair with one of the X′ nucleotides. Alternatively, at least two of the X nucleotides form base pairs with the corresponding X′ nucleotides; or all three of the X nucleotides all form base pairs with the corresponding X′ nucleotides.

[0311] In certain embodiments, the modification on the Y nucleotide is different than the modification on the Y′ nucleotide, the modification on the Z nucleotide is different than the modification on the Z′ nucleotide, or the modification on the X nucleotide is different than the modification on the X′ nucleotide.

[0312] In certain embodiments, when the dsRNAi agent is represented by formula (IIId), the Nₐ modifications are 2′-O-methyl or 2′-fluoro modifications. In other embodiments, when the RNAi agent is represented by formula (IIId), the Nₐ modifications are 2′-O-methyl or 2′-fluoro modifications and nₚ′>0 and at least one nₚ′ is linked to a neighboring nucleotide a via phosphorothioate linkage. In yet other embodiments, when the RNAi agent is represented by formula (IIId), the Nₐ modifications are 2′-O-methyl or 2′-fluoro modifications, nₚ′>0 and at least one nₚ′ is linked to a neighboring nucleotide via phosphorothioate linkage, and the sense strand is conjugated to one or more GalNAc derivatives attached through a bivalent or trivalent branched linker (described below). In other embodiments, when the RNAi agent is represented by formula (IIId), the Nₐ modifications are 2′-O-methyl or 2′-fluoro modifications, nₚ′>0 and at least one nₚ′ is linked to a neighboring nucleotide via phosphorothioate linkage, the sense strand comprises at least one phosphorothioate linkage, and the sense strand is conjugated to one or more GalNAc derivatives attached through a bivalent or trivalent branched linker.

[0313] In some embodiments, when the dsRNAi agent is represented by formula (IIIa), the Nₐ modifications are 2′-O-methyl or 2′-fluoro modifications, nₚ′>0 and at least one nₚ′ is linked to a neighboring nucleotide via phosphorothioate linkage, the sense strand comprises at least one phosphorothioate linkage, and the sense strand is conjugated to one or more GalNAc derivatives attached through a bivalent or trivalent branched linker.

[0314] In some embodiments, the dsRNAi agent is a multimer containing at least two duplexes represented by formula (III), (IIIa), (IIIb), (IIIc), and (IIId), wherein the duplexes are connected by a linker. The linker can be cleavable or non-cleavable. Optionally, the multimer further comprises a ligand. Each of the duplexes can target the same gene or two different genes; or each of the duplexes can target same gene at two different target sites.

[0315] In some embodiments, the dsRNAi agent is a multimer containing three, four, five, six, or more duplexes represented by formula (III), (IIIa), (IIIb), (IIIc), and (IIId), wherein the duplexes are connected by a linker. The linker can be cleavable or non-cleavable. Optionally, the multimer further comprises a ligand. Each of the duplexes can target the same gene or two different genes; or each of the duplexes can target same gene at two different target sites.

[0316] In one embodiment, two dsRNAi agents represented by at least one of formulas (III), (IIIa), (IIIb), (IIIc), and (IIId) are linked to each other at the 5′ end, and one or both of the 3′ ends, and are optionally conjugated to a ligand. Each of the agents can target the same gene or two different genes; or each of the agents can target same gene at two different target sites.

[0317] In certain embodiments, an RNAi agent of the invention may contain a low number of nucleotides containing a 2′-fluoro modification, e.g., 10 or fewer nucleotides with 2′-fluoro modification. For example, the RNAi agent may contain 10, 9, 8, 7, 6, 5, 4, 3, 2, 1 or 0 nucleotides with a 2′-fluoro modification. In a specific embodiment, the RNAi agent of the invention contains 10 nucleotides with a 2′-fluoro modification, e.g., 4 nucleotides with a 2′-fluoro modification in the sense strand and 6 nucleotides with a 2′-fluoro modification in the antisense strand. In another specific embodiment, the RNAi agent of the invention contains 6 nucleotides with a 2′-fluoro modification, e.g., 4 nucleotides with a 2′-fluoro modification in the sense strand and 2 nucleotides with a 2′-fluoro modification in the antisense strand.

[0318] In other embodiments, an RNAi agent of the invention may contain an ultra low number of nucleotides containing a 2′-fluoro modification, e.g., 2 or fewer nucleotides containing a 2′-fluoro modification. For example, the RNAi agent may contain 2, 1 of 0 nucleotides with a 2′-fluoro modification. In a specific embodiment, the RNAi agent may contain 2 nucleotides with a 2′-fluoro modification, e.g., 0 nucleotides with a 2-fluoro modification in the sense strand and 2 nucleotides with a 2′-fluoro modification in the antisense strand.

[0319] Various publications describe multimeric iRNAs that can be used in the methods of the invention. Such publications include WO2007/091269, U.S. Pat. No. 7,858,769, WO2010/141511, WO2007/117686, WO2009/014887, and WO2011/031520 the entire contents of each of which are hereby incorporated herein by reference.

[0320] In certain embodiments, the compositions and methods of the disclosure include a vinyl phosphonate (VP) modification of an RNAi agent as described herein. In exemplary embodiments, a 5′ vinyl phosphonate modified nucleotide of the disclosure has the structure:

[chemical structure]

wherein X is O or S;
[0321] R is hydrogen, hydroxy, fluoro, or C₁₋₂₀alkoxy (e.g., methoxy or n-hexadecyloxy);
[0322] R^{5′} is ═C(H)—P(O)(OH)₂ and the double bond between the C5′ carbon and R^{5′} is in the E or Z orientation (e.g., E orientation); and
[0323] B is a nucleobase or a modified nucleobase, optionally where B is adenine, guanine, cytosine, thymine, or uracil.

[0324] In one embodiment, R5′ is ═C(H)—P(O)(OH)₂ and the double bond between the C5′ carbon and R5′ is in the E orientation. In another embodiment, R is methoxy and R5′ is ═C(H)—P(O)(OH)₂ and the double bond between the C5′ carbon and R5′ is in the E orientation. In another embodiment, X is S. R is methoxy, and R5′ is =C(H)—P(O)(OH)₂ and the double bond between the C5′ carbon and R5′ is in the E orientation.

[0325] A vinyl phosphonate of the instant disclosure may be attached to either the antisense or the sense strand of a dsRNA of the disclosure. In certain embodiments, a vinyl phosphonate of the instant disclosure is attached to the antisense strand of a dsRNA, optionally at the 5′ end of the antisense strand of the dsRNA.

[0326] Vinyl phosphonate modifications are also contemplated for the compositions and methods of the instant disclosure. An exemplary vinyl phosphonate structure includes the preceding structure, where R5′ is =C(H)—OP(O)(OH)₂ and the double bond between the C5′ carbon and R5′ is in the E or Z orientation (e.g., E orientation).

[0327] As described in more detail below, the iRNA that contains conjugations of one or more carbohydrate moieties to an iRNA can optimize one or more properties of the iRNA. In many cases, the carbohydrate moiety will be attached to a modified subunit of the iRNA. For example, the ribose sugar of one or more ribonucleotide subunits of a iRNA can be replaced with another moiety, e.g., a non-carbohydrate (such as, cyclic) carrier to which is attached a carbohydrate ligand. A ribonucleotide subunit in which the ribose sugar of the subunit has been so replaced is referred to herein as a ribose replacement modification subunit (RRMS). A cyclic carrier may be a carbocyclic ring system, i.e., all ring atoms are carbon atoms, or a heterocyclic ring system, i.e., one or more ring atoms may be a heteroatom, e.g., nitrogen, oxygen, sulfur. The cyclic carrier may be a monocyclic ring system, or may contain two or more rings, e.g. fused rings. The cyclic carrier may be a fully saturated ring system, or it may contain one or more double bonds.

[0328] The ligand may be attached to the polynucleotide via a carrier. The carriers include (i) at least one “backbone attachment point.” such as, two “backbone attachment points” and (ii) at least one “tethering attachment point.” A “backbone attachment point” as used herein refers to a functional group, e.g. a hydroxyl group, or generally, a bond available for, and that is suitable for incorporation of the carrier into the backbone, e.g., the phosphate, or modified phosphate, e.g., sulfur containing, backbone, of a ribonucleic acid. A “tethering attachment point” (TAP) in some embodiments refers to a constituent ring atom of the cyclic carrier, e.g., a carbon atom or a heteroatom (distinct from an atom which provides a backbone attachment point), that connects a selected moiety. The moiety can be, e.g., a carbohydrate, e.g. monosaccharide, disaccharide, trisaccharide, tetrasaccharide, oligosaccharide, or polysaccharide. Optionally, the selected moiety is connected by an intervening tether to the cyclic carrier. Thus, the cyclic carrier will often include a functional group, e.g., an amino group, or generally, provide a bond, that is suitable for incorporation or tethering of another chemical entity, e.g., a ligand to the constituent ring.

[0329] The iRNA may be conjugated to a ligand via a carrier, wherein the carrier can be cyclic group or acyclic group. In one embodiment, the cyclic group is selected from pyrrolidinyl, pyrazolinyl, pyrazolidinyl, imidazolinyl, imidazolidinyl, piperidinyl, piperazinyl, [1,3]dioxolane, oxazolidinyl, isoxazolidinyl, morpholinyl, thiazolidinyl, isothiazolidinyl, quinoxalinyl, pyridazinonyl, tetrahydrofuryl, and decalin. In one embodiment, the acyclic group is a serinol backbone or diethanolamine backbone.

i. Thermally Destabilizing Modifications

[0330] In certain embodiments, a dsRNA molecule can be optimized for RNA interference by incorporating thermally destabilizing modifications in the seed region of the antisense strand. As used herein “seed region” means at positions 2-9 of the 5′-end of the referenced strand. For example, thermally destabilizing modifications can be incorporated in the seed region of the antisense strand to reduce or inhibit off-target gene silencing.

[0331] The term “thermally destabilizing modification(s)” includes modification(s) that would result with a dsRNA with a lower overall melting temperature (Tₘ) than the Tₘ of the dsRNA without having such modification(s). For example, the thermally destabilizing modification(s) can decrease the Tₘ of the dsRNA by 1-4° C., such as one, two, three or four degrees Celcius. And, the term “thermally destabilizing nucleotide” refers to a nucleotide containing one or more thermally destabilizing modifications.

[0332] It has been discovered that dsRNAs with an antisense strand comprising at least one thermally destabilizing modification of the duplex within the first 9 nucleotide positions, counting from the 5′ end, of the antisense strand have reduced off-target gene silencing activity. Accordingly, in some embodiments, the antisense strand comprises at least one (e.g., one, two, three, four, five or more) thermally destabilizing modification of the duplex within the first 9 nucleotide positions of the 5′ region of the antisense strand. In some embodiments, one or more thermally destabilizing modification(s) of the duplex is/are located in positions 2-9, such as, positions 4-8, from the 5′-end of the antisense strand. In some further embodiments, the thermally destabilizing modification(s) of the duplex is/are located at position 6, 7 or 8 from the 5′-end of the antisense strand. In still some further embodiments, the thermally destabilizing modification of the duplex is located at position 7 from the 5′-end of the antisense strand. In some embodiments, the thermally destabilizing modification of the duplex is located at position 2, 3, 4, 5 or 9 from the 5′-end of the antisense strand.

[0333] An iRNA agent comprises a sense strand and an antisense strand, each strand having 14 to 40 nucleotides. The RNAi agent may be represented by formula (L):

[chemical structure]

In formula (L), B1, B2, B3, B1′, B2′, B3′, and B4′ each are independently a nucleotide containing a modification selected from the group consisting of 2′-O-alkyl, 2′-substituted alkoxy, 2′-substituted alkyl, 2′-halo, ENA, and BNA/LNA. In one embodiment, B1, B2, B3, B1′, B2′, B3′, and B4′ each contain 2′-OMe modifications. In one embodiment, B1, B2, B3, B1′, B2′, B3′, and B4′ each contain 2′-OMe or 2′-F modifications. In one embodiment, at least one of B1, B2, B3, B1′, B2′, B3′, and B4′ contain 2′-O—N-methylacetamido (2′-O-NMA, 2′O—CH2C(O)N(Me)H) modification.

[0334] C1 is a thermally destabilizing nucleotide placed at a site opposite to the seed region of the antisense strand (i.e., at positions 2-8 of the 5′-end of the antisense strand). For example, C1 is at a position of the sense strand that pairs with a nucleotide at positions 2-8 of the 5′-end of the antisense strand. In one example, C1 is at position 15 from the 5′-end of the sense strand. C1 nucleotide bears the thermally destabilizing modification which can include abasic modification; mismatch with the opposing nucleotide in the duplex; and sugar modification such as 2′-deoxy modification or acyclic nucleotide e.g., unlocked nucleic acids (UNA) or glycerol nucleic acid (GNA); or 2′-5′-linked ribonucleotides (“3′-RNA”). In one embodiment, C1 has thermally destabilizing modification selected from the group consisting of: i) mismatch with the opposing nucleotide in the antisense strand; ii) abasic modification selected from the group consisting of:

[chemical structure]

and iii) sugar modification selected from the group consisting of:

[chemical structure]

wherein B is a modified or unmodified nucleobase, R¹ and R² independently are H, halogen, OR₃, or alkyl; and R₃ is H, alkyl, cycloalkyl, aryl, aralkyl, heteroaryl or sugar. In one embodiment, the thermally destabilizing modification in C1 is a mismatch selected from the group consisting of G:G, G:A, G:U, G:T, A:A, A:C, C:C, C:U, C:T, U:U, T:T, and U:T; and optionally, at least one nucleobase in the mismatch pair is a 2′-deoxy nucleobase. In one example, the thermally destabilizing modification in C1 is GNA or

[chemical structure]

T1, T1′, T2′, and T3′ each independently represent a nucleotide comprising a modification providing the nucleotide a steric bulk that is less or equal to the steric bulk of a 2′-OMe modification. A steric bulk refers to the sum of steric effects of a modification. Methods for determining steric effects of a modification of a nucleotide are known to one skilled in the art. The modification can be at the 2′ position of a ribose sugar of the nucleotide, or a modification to a non-ribose nucleotide, acyclic nucleotide, or the backbone of the nucleotide that is similar or equivalent to the 2′ position of the ribose sugar, and provides the nucleotide a steric bulk that is less than or equal to the steric bulk of a 2′-OMe modification. For example, T1, T1′, T2′, and T3′ are each independently selected from DNA, RNA, LNA, 2′-F, and 2′-F-5′-methyl. In one embodiment, T1 is DNA. In one embodiment, T1′ is DNA, RNA or LNA. In one embodiment, T2′ is DNA or RNA. In one embodiment, T3′ is DNA or RNA.
n¹, n³, and q¹ are independently 4 to 15 nucleotides in length.
n⁵, q³, and q⁷ are independently 1-6 nucleotide(s) in length.
n⁴, q², and q⁶ are independently 1-3 nucleotide(s) in length; alternatively, n⁴ is 0.
q⁵ is independently 0-10 nucleotide(s) in length.
n² and q⁴ are independently 0-3 nucleotide(s) in length.

[0335] Alternatively, n⁴ is 0-3 nucleotide(s) in length.

[0336] In one embodiment, n⁴ can be 0. In one example, n⁴ is 0, and q² and q⁶ are 1. In another example, n⁴ is 0, and q² and q⁶ are 1, with two phosphorothioate internucleotide linkage modifications within position 1-5 of the sense strand (counting from the 5′-end of the sense strand), and two phosphorothioate internucleotide linkage modifications at positions 1 and 2 and two phosphorothioate internucleotide linkage modifications within positions 18-23 of the antisense strand (counting from the 5′-end of the antisense strand).

[0337] In one embodiment, n⁴, q², and q⁶ are each 1.

[0338] In one embodiment, n², n⁴, q², q⁴, and q⁶ are each 1.

[0339] In one embodiment, C1 is at position 14-17 of the 5′-end of the sense strand, when the sense strand is 19-22 nucleotides in length, and n⁴ is 1. In one embodiment, C1 is at position 15 of the 5′-end of the sense strand

[0340] In one embodiment, T3′ starts at position 2 from the 5′ end of the antisense strand. In one example, T3′ is at position 2 from the 5′ end of the antisense strand and q⁶ is equal to 1.

[0341] In one embodiment, T1′ starts at position 14 from the 5′ end of the antisense strand. In one example, T1′ is at position 14 from the 5′ end of the antisense strand and q² is equal to 1.

[0342] In an exemplary embodiment, T3′ starts from position 2 from the 5′ end of the antisense strand and T1′ starts from position 14 from the 5′ end of the antisense strand. In one example, T3′ starts from position 2 from the 5′ end of the antisense strand and q⁶ is equal to 1 and T1′ starts from position 14 from the 5′ end of the antisense strand and q² is equal to 1.

[0343] In one embodiment, T1′ and T3′ are separated by 11 nucleotides in length (i.e. not counting the T1′ and T3′ nucleotides).

[0344] In one embodiment, T1′ is at position 14 from the 5′ end of the antisense strand. In one example, T1′ is at position 14 from the 5′ end of the antisense strand and q² is equal to 1, and the modification at the 2′ position or positions in a non-ribose, acyclic or backbone that provide less steric bulk than a 2′-OMe ribose.

[0345] In one embodiment, T3′ is at position 2 from the 5′ end of the antisense strand. In one example, T3′ is at position 2 from the 5′ end of the antisense strand and q⁶ is equal to 1, and the modification at the 2′ position or positions in a non-ribose, acyclic or backbone that provide less than or equal to steric bulk than a 2′-OMe ribose.

[0346] In one embodiment, T1 is at the cleavage site of the sense strand. In one example, T1 is at position 11 from the 5′ end of the sense strand, when the sense strand is 19-22 nucleotides in length, and n² is 1. In an exemplary embodiment, T1 is at the cleavage site of the sense strand at position 11 from the 5′ end of the sense strand, when the sense strand is 19-22 nucleotides in length, and n² is 1.

[0347] In one embodiment, T2′ starts at position 6 from the 5′ end of the antisense strand. In one example, T2′ is at positions 6-10 from the 5′ end of the antisense strand, and q⁴ is 1.

[0348] In an exemplary embodiment, T1 is at the cleavage site of the sense strand, for instance, at position 11 from the 5′ end of the sense strand, when the sense strand is 19-22 nucleotides in length, and n² is 1; T1′ is at position 14 from the 5′ end of the antisense strand, and q² is equal to 1, and the modification to T1′ is at the 2′ position of a ribose sugar or at positions in a non-ribose, acyclic or backbone that provide less steric bulk than a 2′-OMe ribose; T2′ is at positions 6-10 from the 5′ end of the antisense strand, and q⁴ is 1; and T3′ is at position 2 from the 5′ end of the antisense strand, and q⁶ is equal to 1, and the modification to T3′ is at the 2′ position or at positions in a non-ribose, acyclic or backbone that provide less than or equal to steric bulk than a 2′-OMe ribose.

[0349] In one embodiment, T2′ starts at position 8 from the 5′ end of the antisense strand. In one example, T2′ starts at position 8 from the 5′ end of the antisense strand, and q⁴ is 2.

[0350] In one embodiment, T2′ starts at position 9 from the 5′ end of the antisense strand. In one example, T2′ is at position 9 from the 5′ end of the antisense strand, and q⁴ is 1.

[0351] In one embodiment, B1′ is 2′-OMe or 2′-F, q¹ is 9, T1′ is 2′-F, q² is 1, B2′ is 2′-OMe or 2′-F, q³ is 4, T2′ is 2′-F, q⁴ is 1, B3′ is 2′-OMe or 2′-F, q⁵ is 6, T3′ is 2′-F, q⁶ is 1, B4′ is 2′-OMe, and q⁷ is 1; with two phosphorothioate internucleotide linkage modifications within positions 1-5 of the sense strand (counting from the 5′-end of the sense strand), and two phosphorothioate internucleotide linkage modifications at positions 1 and 2 and two phosphorothioate internucleotide linkage modifications within positions 18-23 of the antisense strand (counting from the 5′-end of the antisense strand).

[0352] In one embodiment, n⁴ is 0, B3 is 2′-OMe, n⁵ is 3, B1′ is 2′-OMe or 2′-F, q¹ is 9, T1′ is 2′-F, q² is 1, B2′ is 2′-OMe or 2′-F, q³ is 4, T2′ is 2′-F, q⁴ is 1, B3′ is 2′-OMe or 2′-F, q⁵ is 6, T3′ is 2′-F, q⁶ is 1, B4′ is 2′-OMe, and q⁷ is 1; with two phosphorothioate internucleotide linkage modifications within positions 1-5 of the sense strand (counting from the 5′-end of the sense strand), and two phosphorothioate internucleotide linkage modifications at positions 1 and 2 and two phosphorothioate internucleotide linkage modifications within positions 18-23 of the antisense strand (counting from the 5′-end of the antisense strand).

[0353] In one embodiment, B1 is 2′-OMe or 2′-F, n¹ is 8, T1 is 2′F, n² is 3, B2 is 2′-OMe, n³ is 7, n⁴ is 0, B3 is 2′OMe, n⁵ is 3, B1′ is 2′-OMe or 2′-F, q¹ is 9, T1′ is 2′-F, q² is 1, B2′ is 2′-OMe or 2′-F, q³ is 4, T2′ is 2′-F, q⁴ is 2, B3′ is 2′-OMe or 2′-F, q⁵ is 5, T3′ is 2′-F, q⁶ is 1, B4′ is 2′-OMe, and q⁷ is 1.

[0354] In one embodiment, B1 is 2′-OMe or 2′-F, n¹ is 8, T1 is 2′F, n² is 3, B2 is 2′-OMe, n³ is 7, n⁴ is 0, B3 is 2′-OMe, n⁵ is 3, B1′ is 2′-OMe or 2′-F, q¹ is 9, T1′ is 2′-F, q² is 1, B2′ is 2′-OMe or 2′-F, q³ is 4, T2′ is 2′-F, q⁴ is 2, B3′ is 2′-OMe or 2′-F, q⁵ is 5, T3′ is 2′-F, q⁶ is 1, B4′ is 2′-OMe, and q⁷ is 1; with two phosphorothioate internucleotide linkage modifications within positions 1-5 of the sense strand (counting from the 5′-end of the sense strand), and two phosphorothioate internucleotide linkage modifications at positions 1 and 2 and two phosphorothioate internucleotide linkage modifications within positions 18-23 of the antisense strand (counting from the 5′-end of the antisense strand).

[0355] In one embodiment, B1 is 2′-OMe or 2′-F, n¹ is 6, T1 is 2′F, n² is 3, B2 is 2′-OMe, n³ is 7, n⁴ is 0, B3 is 2′OMe, n⁵ is 3, B1′ is 2′-OMe or 2′-F, q¹ is 7, T1′ is 2′-F, q² is 1, B2′ is 2′-OMe or 2′-F, q³ is 4, T2′ is 2′-F, q⁴ is 2, B3′ is 2′-OMe or 2′-F, q⁵ is 5, T3′ is 2′-F, q⁶ is 1, B4′ is 2′-OMe, and q⁷ is 1.

[0356] In one embodiment, B1 is 2′-OMe or 2′-F, n¹ is 6, T1 is 2′F, n² is 3, B2 is 2′-OMe, n³ is 7, n⁴ is 0, B3 is 2′-OMe, n⁵ is 3, B1′ is 2′-OMe or 2′-F, q¹ is 7, T1′ is 2′-F, q² is 1, B2′ is 2′-OMe or 2′-F, q³ is 4, T2′ is 2′-F, q⁴ is 2, B3′ is 2′-OMe or 2′-F, q⁵ is 5, T3′ is 2′-F, q⁶ is 1, B4′ is 2′-OMe, and q⁷ is 1; with two phosphorothioate internucleotide linkage modifications within positions 1-5 of the sense strand (counting from the 5′-end of the sense strand), and two phosphorothioate internucleotide linkage modifications at positions 1 and 2 and two phosphorothioate internucleotide linkage modifications within positions 18-23 of the antisense strand (counting from the 5′-end of the antisense strand).

[0357] In one embodiment, B1 is 2′-OMe or 2′-F, n¹ is 8, T1 is 2′F, n² is 3, B2 is 2′-OMe, n³ is 7, n⁴ is 0, B3 is 2′OMe, n⁵ is 3, B1′ is 2′-OMe or 2′-F, q¹ is 9, T1′ is 2′-F, q² is 1, B2′ is 2′-OMe or 2′-F, q³ is 4, T2′ is 2′-F, q⁴ is 1, B3′ is 2′-OMe or 2′-F, q⁵ is 6, T3′ is 2′-F, q⁶ is 1, B4′ is 2′-OMe, and q⁷ is 1.

[0358] In one embodiment, B1 is 2′-OMe or 2′-F, n¹ is 8, T1 is 2′F, n² is 3, B2 is 2′-OMe, n³ is 7, n⁴ is 0, B3 is 2′-OMe, n⁵ is 3, B1′ is 2′-OMe or 2′-F, q¹ is 9, T1′ is 2′-F, q² is 1, B2′ is 2′-OMe or 2′-F, q³ is 4, T2′ is 2′-F, q⁴ is 1, B3′ is 2′-OMe or 2′-F, q⁵ is 6, T3′ is 2′-F, q⁶ is 1, B4′ is 2′-OMe, and q⁷ is 1; with two phosphorothioate internucleotide linkage modifications within positions 1-5 of the sense strand (counting from the 5′-end of the sense strand), and two phosphorothioate internucleotide linkage modifications at positions 1 and 2 and two phosphorothioate internucleotide linkage modifications within positions 18-23 of the antisense strand (counting from the 5′-end of the antisense strand).

[0359] In one embodiment, B1 is 2′-OMe or 2′-F, n¹ is 8, T1 is 2′F, n² is 3, B2 is 2′-OMe, n³ is 7, n⁴ is 0, B3 is 2′OMe, n⁵ is 3, B1′ is 2′-OMe or 2′-F, q¹ is 9, T1′ is 2′-F, q¹ is 1, B2′ is 2′-OMe or 2′-F, q³ is 5. T2′ is 2′-F, q⁴ is 1, B3′ is 2′-OMe or 2′-F, q⁵ is 5, T3′ is 2′-F, q⁶ is 1, B4′ is 2′-OMe, and q⁷ is 1; optionally with at least 2 additional TT at the 3′-end of the antisense strand.

[0360] In one embodiment, B1 is 2′-OMe or 2′-F, n¹ is 8, T1 is 2′F, n² is 3, B2 is 2′-OMe, n³ is 7, n⁴ is 0, B3 is 2′-OMe, n⁵ is 3, B1′ is 2′-OMe or 2′-F, q¹ is 9, T1′ is 2′-F, q² is 1, B2′ is 2′-OMe or 2′-F, q³ is 5, T2′ is 2′-F, q⁴ is 1, B3′ is 2′-OMe or 2′-F, q⁵ is 5, T3′ is 2′-F, q⁶ is 1, B4′ is 2′-OMe, and q⁷ is 1; optionally with at least 2 additional TT at the 3′-end of the antisense strand; with two phosphorothioate internucleotide linkage modifications within positions 1-5 of the sense strand (counting from the 5′-end of the sense strand), and two phosphorothioate internucleotide linkage modifications at positions 1 and 2 and two phosphorothioate internucleotide linkage modifications within positions 18-23 of the antisense strand (counting from the 5′-end of the antisense strand).

[0361] In one embodiment, B1 is 2′-OMe or 2′-F, n¹ is 8, T1 is 2′F, n² is 3, B2 is 2′-OMe, n³ is 7, n⁴ is 0, B3 is 2′-OMe, n⁵ is 3, B1′ is 2′-OMe or 2′-F, q¹ is 9, T1′ is 2′-F, q¹ is 1, B2′ is 2′-OMe or 2′-F, q³ is 4, q⁴ is 0, B3′ is 2′-OMe or 2′-F, q⁵ is 7, T3′ is 2′-F, q⁶ is 1, B4′ is 2′-OMe, and q⁷ is 1.

[0362] In one embodiment, B1 is 2′-OMe or 2′-F, n¹ is 8, T1 is 2′F, n² is 3, B2 is 2′-OMe, n³ is 7, n⁴ is 0, B3 is 2′-OMe, n⁵ is 3, B1′ is 2′-OMe or 2′-F, q¹ is 9, T1′ is 2′-F, q² is 1, B2′ is 2′-OMe or 2′-F, q³ is 4, q⁴ is 0, B3′ is 2′-OMe or 2′-F, q⁵ is 7, T3′ is 2′-F, q⁶ is 1, B4′ is 2′-OMe, and q⁷ is 1; with two phosphorothioate internucleotide linkage modifications within positions 1-5 of the sense strand (counting from the 5′-end), and two phosphorothioate internucleotide linkage modifications at positions 1 and 2 and two phosphorothioate internucleotide linkage modifications within positions 18-23 of the antisense strand (counting from the 5′-end).

[0363] In one embodiment, B1 is 2′-OMe or 2′-F, n¹ is 8, T1 is 2′F, n² is 3, B2 is 2′-OMe, n³ is 7, n⁴ is 0, B3 is 2′OMe, n⁵ is 3, B1′ is 2′-OMe or 2′-F, q¹ is 9, T1′ is 2′-F, q² is 1, B2′ is 2′-OMe or 2′-F, q³ is 4, T2′ is 2′-F, q⁴ is 2, B3′ is 2′-OMe or 2′-F, q⁵ is 5, T3′ is 2′-F, q⁶ is 1, B4′ is 2′-F, and q⁷ is 1.

In one embodiment, B1 is 2′-OMe or 2′-F, n¹ is 8, T1 is 2′F, n² is 3, B2 is 2′-OMe, n³ is 7, n⁴ is 0, B3 is 2′-OMe, n⁵ is 3, B1′ is 2′-OMe or 2′-F, q¹ is 9, T1′ is 2′-F, q² is 1, B2′ is 2′-OMe or 2′-F, q³ is 4, T2′ is 2′-F, q⁴ is 2, B3′ is 2′-OMe or 2′-F, q⁵ is 5, T3′ is 2′-F, q⁶ is 1, B4′ is 2′-F, and q⁷ is 1; with two phosphorothioate internucleotide linkage modifications within positions 1-5 of the sense strand (counting from the 5′-end of the sense strand), and two phosphorothioate internucleotide linkage modifications at positions 1 and 2 and two phosphorothioate internucleotide linkage modifications within positions 18-23 of the antisense strand (counting from the 5′-end of the antisense strand).

[0364] In one embodiment, B1 is 2′-OMe or 2′-F, n¹ is 8, T1 is 2′F, n¹ is 3, B2 is 2′-OMe, n³ is 7, n⁴ is 0, B3 is 2′-OMe, n⁵ is 3, B1′ is 2′-OMe or 2′-F, q¹ is 9, T1′ is 2′-F, q² is 1, B2′ is 2′-OMe or 2′-F, q³ is 4, q⁴ is 0, B3′ is 2′-OMe or 2′-F, q⁵ is 7, T3′ is 2′-F, q⁶ is 1, B4′ is 2′-F, and q⁷ is 1.

In one embodiment, B1 is 2′-OMe or 2′-F, n¹ is 8, T1 is 2′F, n² is 3, B2 is 2′-OMe, n³ is 7, n⁴ is 0, B3 is 2′-OMe, n⁵ is 3, B1′ is 2′-OMe or 2′-F, q¹ is 9, T1′ is 2′-F, q² is 1, B2′ is 2′-OMe or 2′-F, q³ is 4, q⁴ is 0, B3′ is 2′-OMe or 2′-F, q⁵ is 7, T3′ is 2′-F, q⁶ is 1, B4′ is 2′-F, and q⁷ is 1; with two phosphorothioate internucleotide linkage modifications within positions 1-5 of the sense strand (counting from the 5′-end of the sense strand), and two phosphorothioate internucleotide linkage modifications at positions 1 and 2 and two phosphorothioate internucleotide linkage modifications within positions 18-23 of the antisense strand (counting from the 5′-end of the antisense strand).

[0365] The RNAi agent can comprise a phosphorus-containing group at the 5′-end of the sense strand or antisense strand. The 5′-end phosphorus-containing group can be 5′-end phosphate (5′-P), 5′-end phosphorothioate (5′-PS), 5′-end phosphorodithioate (5′-PS2), 5′-end vinylphosphonate (5′-VP), 5′-end methylphosphonate (MePhos), or 5′-deoxy-5′-C-malonyl

[chemical structure]

When the 5′-end phosphorus-containing group is 5′-end vinylphosphonate (5′-VP), the 5′-VP can be either 5′-E-VP isomer (i.e., trans-vinylphosphonate,

[chemical structure]

5′-Z—VP isomer (i.e., cis-vinylphosphonate,

[chemical structure]

or mixtures thereof.

[0366] In one embodiment, the RNAi agent comprises a phosphorus-containing group at the 5′-end of the sense strand. In one embodiment, the RNAi agent comprises a phosphorus-containing group at the 5′-end of the antisense strand.

[0367] In one embodiment, the RNAi agent comprises a 5′-P. In one embodiment, the RNAi agent comprises a 5′-P in the antisense strand.

[0368] In one embodiment, the RNAi agent comprises a 5′-PS. In one embodiment, the RNAi agent comprises a 5′-PS in the antisense strand.

[0369] In one embodiment, the RNAi agent comprises a 5′-VP. In one embodiment, the RNAi agent comprises a 5′-VP in the antisense strand. In one embodiment, the RNAi agent comprises a 5′-E-VP in the antisense strand. In one embodiment, the RNAi agent comprises a 5′-Z—VP in the antisense strand.

[0370] In one embodiment, the RNAi agent comprises a 5′-PS₂. In one embodiment, the RNAi agent comprises a 5′-PS₂ in the antisense strand.

[0371] In one embodiment, the RNAi agent comprises a 5′-PS₂. In one embodiment, the RNAi agent comprises a 5′-deoxy-5′-C-malonyl in the antisense strand.

In one embodiment, B1 is 2′-OMe or 2′-F, n¹ is 8, T1 is 2′F, n² is 3, B2 is 2′-OMe, n³ is 7, n⁴ is 0, B3 is 2′OMe, n⁵ is 3, B1′ is 2′-OMe or 2′-F, q¹ is 9, T1′ is 2′-F, q² is 1, B2′ is 2′-OMe or 2′-F, q³ is 4, T2′ is 2′-F, q⁴ is 2, B3′ is 2′-OMe or 2′-F, q⁵ is 5, T3′ is 2′-F, q⁶ is 1, B4′ is 2′-OMe, and q⁷ is 1. The RNAi agent also comprises a 5′-PS.

[0372] In one embodiment, B1 is 2′-OMe or 2′-F, n¹ is 8, T1 is 2′F, n² is 3, B2 is 2′-OMe, n³ is 7, n⁴ is 0, B3 is 2′OMe, n⁵ is 3, B1′ is 2′-OMe or 2′-F, q¹ is 9, T1′ is 2′-F, q² is 1, B2′ is 2′-OMe or 2′-F, q³ is 4, T2′ is 2′-F, q⁴ is 2, B3′ is 2′-OMe or 2′-F, q⁵ is 5, T3′ is 2′-F, q⁶ is 1, B4′ is 2′-OMe, and q⁷ is 1. The RNAi agent also comprises a 5′-P.

[0373] In one embodiment, B1 is 2′-OMe or 2′-F, n¹ is 8, T1 is 2′F, n² is 3, B2 is 2′-OMe, n³ is 7, n⁴ is 0, B3 is 2′OMe, n⁵ is 3, B1′ is 2′-OMe or 2′-F, q¹ is 9, T1′ is 2′-F, q² is 1, B2′ is 2′-OMe or 2′-F, q³ is 4, T2′ is 2′-F, q⁴ is 2, B3′ is 2′-OMe or 2′-F, q⁵ is 5, T3′ is 2′-F, q⁶ is 1, B4′ is 2′-OMe, and q⁷ is 1. The RNAi agent also comprises a 5′-VP. The 5′-VP may be 5′-E-VP, 5′-Z—VP, or combination thereof.

[0374] In one embodiment, B1 is 2′-OMe or 2′-F, n¹ is 8, T1 is 2′F, n² is 3, B2 is 2′-OMe, n³ is 7, n⁴ is 0, B3 is 2′OMe, n⁵ is 3, B1′ is 2′-OMe or 2′-F, q¹ is 9, T1′ is 2′-F, q² is 1, B2′ is 2′-OMe or 2′-F, q³ is 4, T2′ is 2′-F, q⁴ is 2, B3′ is 2′-OMe or 2′-F, q⁵ is 5, T3′ is 2′-F, q⁶ is 1, B4′ is 2′-OMe, and q⁷ is 1. The RNAi agent also comprises a 5′-PS₂.

[0375] In one embodiment, B1 is 2′-OMe or 2′-F, n¹ is 8, T1 is 2′F, n² is 3, B2 is 2′-OMe, n³ is 7, n⁴ is 0, B3 is 2′OMe, n⁵ is 3, B1′ is 2′-OMe or 2′-F, q¹ is 9, T1′ is 2′-F, q² is 1, B2′ is 2′-OMe or 2′-F, q³ is 4, T2′ is 2′-F, q⁴ is 2, B3′ is 2′-OMe or 2′-F, q⁵ is 5, T3′ is 2′-F, q⁶ is 1, B4′ is 2′-OMe, and q⁷ is 1. The RNAi agent also comprises a 5′-deoxy-5′-C-malonyl.

[0376] In one embodiment, B1 is 2′-OMe or 2′-F, n¹ is 8, T1 is 2′F, n² is 3, B2 is 2′-OMe, n³ is 7, n⁴ is 0, B3 is 2′-OMe, n⁵ is 3, B1′ is 2′-OMe or 2′-F, q¹ is 9, T1′ is 2′-F, q² is 1, B2′ is 2′-OMe or 2′-F, q³ is 4, T2′ is 2′-F, q⁴ is 2, B3′ is 2′-OMe or 2′-F, q⁵ is 5, T3′ is 2′-F, q⁶ is 1, B4′ is 2′-OMe, and q⁷ is 1; with two phosphorothioate internucleotide linkage modifications within position 1-5 of the sense strand (counting from the 5′-end of the sense strand), and two phosphorothioate internucleotide linkage modifications at positions 1 and 2 and two phosphorothioate internucleotide linkage modifications within positions 18-23 of the antisense strand (counting from the 5′-end of the antisense strand). The RNAi agent also comprises a 5′-P.

[0377] In one embodiment, B1 is 2′-OMe or 2′-F, n¹ is 8, T1 is 2′F, n² is 3, B2 is 2′-OMe, n³ is 7, n⁴ is 0, B3 is 2′-OMe, n⁵ is 3, B1′ is 2′-OMe or 2′-F, q¹ is 9, T1′ is 2′-F, q² is 1, B2′ is 2′-OMe or 2′-F, q³ is 4, T2′ is 2′-F, q⁴ is 2, B3′ is 2′-OMe or 2′-F, q⁵ is 5, T3′ is 2′-F, q⁶ is 1, B4′ is 2′-OMe, and q⁷ is 1; with two phosphorothioate internucleotide linkage modifications within position 1-5 of the sense strand (counting from the 5′-end of the sense strand), and two phosphorothioate internucleotide linkage modifications at positions 1 and 2 and two phosphorothioate internucleotide linkage modifications within positions 18-23 of the antisense strand (counting from the 5′-end of the antisense strand). The RNAi agent also comprises a 5′-PS.

[0378] In one embodiment, B1 is 2′-OMe or 2′-F, n¹ is 8, T1 is 2′F, n² is 3, B2 is 2′-OMe, n³ is 7, n⁴ is 0, B3 is 2′-OMe, n⁵ is 3, B1′ is 2′-OMe or 2′-F, q¹ is 9, T1′ is 2′-F, q² is 1, B2′ is 2′-OMe or 2′-F, q³ is 4, T2′ is 2′-F, q⁴ is 2, B3′ is 2′-OMe or 2′-F, q⁵ is 5, T3′ is 2′-F, q⁶ is 1, B4′ is 2′-OMe, and q⁷ is 1; with two phosphorothioate internucleotide linkage modifications within position 1-5 of the sense strand (counting from the 5′-end of the sense strand), and two phosphorothioate internucleotide linkage modifications at positions 1 and 2 and two phosphorothioate internucleotide linkage modifications within positions 18-23 of the antisense strand (counting from the 5′-end of the antisense strand). The RNAi agent also comprises a 5′-VP. The 5′-VP may be 5′-E-VP, 5′-Z—VP, or combination thereof.

[0379] In one embodiment, B1 is 2′-OMe or 2′-F, n¹ is 8, T1 is 2′F, n² is 3, B2 is 2′-OMe, n³ is 7, n⁴ is 0, B3 is 2′-OMe, n⁵ is 3, B1′ is 2′-OMe or 2′-F, q¹ is 9, T1′ is 2′-F, q² is 1, B2′ is 2′-OMe or 2′-F, q³ is 4, T2′ is 2′-F, q⁴ is 2, B3′ is 2′-OMe or 2′-F, q⁵ is 5, T3′ is 2′-F, q⁶ is 1, B4′ is 2′-OMe, and q⁷ is 1; with two phosphorothioate internucleotide linkage modifications within position 1-5 of the sense strand (counting from the 5′-end of the sense strand), and two phosphorothioate internucleotide linkage modifications at positions 1 and 2 and two phosphorothioate internucleotide linkage modifications within positions 18-23 of the antisense strand (counting from the 5′-end of the antisense strand). The RNAi agent also comprises a 5′-PS₂.

[0380] In one embodiment, B1 is 2′-OMe or 2′-F, n¹ is 8, T1 is 2′F, n² is 3, B2 is 2′-OMe, n³ is 7, n⁴ is 0, B3 is 2′-OMe, n⁵ is 3, B1′ is 2′-OMe or 2′-F, q¹ is 9, T1′ is 2′-F, q² is 1, B2′ is 2′-OMe or 2′-F, q³ is 4, T2′ is 2′-F, q⁴ is 2, B3′ is 2′-OMe or 2′-F, q⁵ is 5, T3′ is 2′-F, q⁶ is 1, B4′ is 2′-OMe, and q⁷ is 1; with two phosphorothioate internucleotide linkage modifications within position 1-5 of the sense strand (counting from the 5′-end of the sense strand), and two phosphorothioate internucleotide linkage modifications at positions 1 and 2 and two phosphorothioate internucleotide linkage modifications within positions 18-23 of the antisense strand (counting from the 5′-end of the antisense strand). The RNAi agent also comprises a 5′-deoxy-5′-C-malonyl.

[0381] In one embodiment, B1 is 2′-OMe or 2′-F, n¹ is 8, T1 is 2′F, n² is 3, B2 is 2′-OMe, n³ is 7, n⁴ is 0, B3 is 2′-OMe, n⁵ is 3, B1′ is 2′-OMe or 2′-F, q¹ is 9, T1′ is 2′-F, q² is 1, B2′ is 2′-OMe or 2′-F, q³ is 4, q⁴ is 0, B3′ is 2′-OMe or 2′-F, q⁵ is 7, T3′ is 2′-F, q⁶ is 1, B4′ is 2′-OMe, and q⁷ is 1. The RNAi agent also comprises a 5′-P.

[0382] In one embodiment, B1 is 2′-OMe or 2′-F, n¹ is 8, T1 is 2′F, n² is 3, B2 is 2′-OMe, n³ is 7, n⁴ is 0, B3 is 2′-OMe, n⁵ is 3, B1′ is 2′-OMe or 2′-F, q¹ is 9, T1′ is 2′-F, q² is 1, B2′ is 2′-OMe or 2′-F, q³ is 4, q⁴ is 0, B3′ is 2′-OMe or 2′-F, q⁵ is 7, T3′ is 2′-F, q⁶ is 1, B4′ is 2′-OMe, and q⁷ is 1. The dsRNA agent also comprises a 5′-PS.

[0383] In one embodiment, B1 is 2′-OMe or 2′-F, n¹ is 8, T1 is 2′F, n² is 3, B2 is 2′-OMe, n³ is 7, n⁴ is 0, B3 is 2′-OMe, n⁵ is 3, B1′ is 2′-OMe or 2′-F, q¹ is 9, T1′ is 2′-F, q² is 1, B2′ is 2′-OMe or 2′-F, q³ is 4, q⁴ is 0, B3′ is 2′-OMe or 2′-F, q⁵ is 7, T3′ is 2′-F, q⁶ is 1, B4′ is 2′-OMe, and q⁷ is 1. The RNAi agent also comprises a 5′-VP. The 5′-VP may be 5′-E-VP. 5′-Z—VP, or combination thereof. In one embodiment, B1 is 2′-OMe or 2′-F, n¹ is 8, T1 is 2′F, n² is 3, B2 is 2′-OMe, n³ is 7, n⁴ is 0, B3 is 2′-OMe, n⁵ is 3, B1′ is 2′-OMe or 2′-F, q¹ is 9, T1′ is 2′-F, q² is 1, B2′ is 2′-OMe or 2′-F, q³ is 4, q⁴ is 0, B3′ is 2′-OMe or 2′-F, q⁵ is 7, T3′ is 2′-F, q⁶ is 1, B4′ is 2′-OMe, and q⁷ is 1. The RNAi agent also comprises a 5′-PS₂.

[0384] In one embodiment, B1 is 2′-OMe or 2′-F, n¹ is 8, T1 is 2′F, n² is 3, B2 is 2′-OMe, n³ is 7, n⁴ is 0, B3 is 2′-OMe, n⁵ is 3, B1′ is 2′-OMe or 2′-F, q¹ is 9, T1′ is 2′-F, q² is 1, B2′ is 2′-OMe or 2′-F, q³ is 4, q⁴ is 0, B3′ is 2′-OMe or 2′-F, 95 is 7, T3′ is 2′-F, q⁶ is 1, B4′ is 2′-OMe, and q⁷ is 1. The RNAi agent also comprises a 5′-deoxy-5′-C-malonyl.

[0385] In one embodiment, B1 is 2′-OMe or 2′-F, n¹ is 8, T1 is 2′F, n¹ is 3, B2 is 2′-OMe, n³ is 7, n⁴ is 0, B3 is 2′-OMe, n⁵ is 3, B1′ is 2′-OMe or 2′-F, q¹ is 9, T1′ is 2′-F, q² is 1, B2′ is 2′-OMe or 2′-F, q³ is 4, q⁴ is 0, B3′ is 2′-OMe or 2′-F, q⁵ is 7, T3′ is 2′-F, q⁶ is 1, B4′ is 2′-OMe, and q⁷ is 1; with two phosphorothioate internucleotide linkage modifications within position 1-5 of the sense strand (counting from the 5′-end), and two phosphorothioate internucleotide linkage modifications at positions 1 and 2 and two phosphorothioate internucleotide linkage modifications within positions 18-23 of the antisense strand (counting from the 5′-end). The RNAi agent also comprises a 5′-P.

[0386] In one embodiment, B1 is 2′-OMe or 2′-F, n¹ is 8, T1 is 2′F, n² is 3, B2 is 2′-OMe, n³ is 7, n⁴ is 0, B3 is 2′-OMe, n⁵ is 3, B1′ is 2′-OMe or 2′-F, q¹ is 9, T1′ is 2′-F, q² is 1, B2′ is 2′-OMe or 2′-F, q³ is 4, q⁴ is 0, B3′ is 2′-OMe or 2′-F, q⁵ is 7, T3′ is 2′-F, q⁶ is 1, B4′ is 2′-OMe, and q⁷ is 1; with two phosphorothioate internucleotide linkage modifications within position 1-5 of the sense strand (counting from the 5′-end), and two phosphorothioate internucleotide linkage modifications at positions 1 and 2 and two phosphorothioate internucleotide linkage modifications within positions 18-23 of the antisense strand (counting from the 5′-end). The RNAi agent also comprises a 5′-PS.

[0387] In one embodiment, B1 is 2′-OMe or 2′-F, n¹ is 8, T1 is 2′F, n² is 3, B2 is 2′-OMe, n³ is 7, n⁴ is 0, B3 is 2′-OMe, n⁵ is 3, B1′ is 2′-OMe or 2′-F, q¹ is 9, T1′ is 2′-F, q² is 1, B2′ is 2′-OMe or 2′-F, q³ is 4, q⁴ is 0, B3′ is 2′-OMe or 2′-F, q⁵ is 7, T3′ is 2′-F, q⁶ is 1, B4′ is 2′-OMe, and q⁷ is 1; with two phosphorothioate internucleotide linkage modifications within position 1-5 of the sense strand (counting from the 5′-end), and two phosphorothioate internucleotide linkage modifications at positions 1 and 2 and two phosphorothioate internucleotide linkage modifications within positions 18-23 of the antisense strand (counting from the 5′-end). The RNAi agent also comprises a 5′-VP. The 5′-VP may be 5′-E-VP. 5′-Z—VP, or combination thereof.

[0388] In one embodiment, B1 is 2′-OMe or 2′-F, n¹ is 8, T1 is 2′F, n² is 3, B2 is 2′-OMe, n³ is 7, n⁴ is 0, B3 is 2′-OMe, n⁵ is 3, B1′ is 2′-OMe or 2′-F, q¹ is 9, T1′ is 2′-F, q² is 1, B2′ is 2′-OMe or 2′-F, q³ is 4, q⁴ is 0, B3′ is 2′-OMe or 2′-F, q⁵ is 7, T3′ is 2′-F, q⁶ is 1, B4′ is 2′-OMe, and q⁷ is 1; with two phosphorothioate internucleotide linkage modifications within position 1-5 of the sense strand (counting from the 5′-end), and two phosphorothioate internucleotide linkage modifications at positions 1 and 2 and two phosphorothioate internucleotide linkage modifications within positions 18-23 of the antisense strand (counting from the 5′-end). The RNAi agent also comprises a 5′-PS₂.

[0389] In one embodiment, B1 is 2′-OMe or 2′-F, n¹ is 8, T1 is 2′F, n¹ is 3, B2 is 2′-OMe, n³ is 7, n⁴ is 0, B3 is 2′-OMe, n⁵ is 3, B1′ is 2′-OMe or 2′-F, q¹ is 9, T1′ is 2′-F, q² is 1, B2′ is 2′-OMe or 2′-F, q³ is 4, q⁴ is 0, B3′ is 2′-OMe or 2′-F, q⁵ is 7, T3′ is 2′-F, q⁶ is 1, B4′ is 2′-OMe, and q⁷ is 1; with two phosphorothioate internucleotide linkage modifications within position 1-5 of the sense strand (counting from the 5′-end), and two phosphorothioate internucleotide linkage modifications at positions 1 and 2 and two phosphorothioate internucleotide linkage modifications within positions 18-23 of the antisense strand (counting from the 5′-end). The RNAi agent also comprises a 5′-deoxy-5′-C-malonyl.

[0390] In one embodiment, B1 is 2′-OMe or 2′-F, n¹ is 8, T1 is 2′F, n² is 3, B2 is 2′-OMe, n³ is 7, n⁴ is 0, B3 is 2′OMe, n⁵ is 3, B1′ is 2′-OMe or 2′-F, q¹ is 9, T1′ is 2′-F, q² is 1, B2′ is 2′-OMe or 2′-F, q³ is 4, T2′ is 2′-F, q⁴ is 2, B3′ is 2′-OMe or 2′-F, q⁵ is 5, T3′ is 2′-F, q⁶ is 1, B4′ is 2′-F, and q⁷ is 1. The RNAi agent also comprises a 5′-P.

[0391] In one embodiment, B1 is 2′-OMe or 2′-F, n¹ is 8, T1 is 2′F, n² is 3, B2 is 2′-OMe, n³ is 7, n⁴ is 0, B3 is 2′OMe, n⁵ is 3, B1′ is 2′-OMe or 2′-F, q¹ is 9, T1′ is 2′-F, q² is 1, B2′ is 2′-OMe or 2′-F, q³ is 4, T2′ is 2′-F, q⁴ is 2, B3′ is 2′-OMe or 2′-F, q⁵ is 5, T3′ is 2′-F, q⁶ is 1, B4′ is 2′-F, and q⁷ is 1. The RNAi agent also comprises a 5′-PS.

[0392] In one embodiment, B1 is 2′-OMe or 2′-F, n¹ is 8, T1 is 2′F, n² is 3, B2 is 2′-OMe, n³ is 7, n⁴ is 0, B3 is 2′OMe, n⁵ is 3, B1′ is 2′-OMe or 2′-F, q¹ is 9, T1′ is 2′-F, q² is 1, B2′ is 2′-OMe or 2′-F, q³ is 4, T2′ is 2′-F, q⁴ is 2, B3′ is 2′-OMe or 2′-F, q⁵ is 5, T3′ is 2′-F, q⁶ is 1, B4′ is 2′-F, and q⁷ is 1. The RNAi agent also comprises a 5′-VP. The 5′-VP may be 5′-E-VP, 5′-Z—VP, or combination thereof.

[0393] In one embodiment, B1 is 2′-OMe or 2′-F, n¹ is 8, T1 is 2′F, n² is 3, B2 is 2′-OMe, n³ is 7, n⁴ is 0, B3 is 2′OMe, n⁵ is 3, B1′ is 2′-OMe or 2′-F, q¹ is 9, T1′ is 2′-F, q² is 1, B2′ is 2′-OMe or 2′-F, q³ is 4, T2′ is 2′-F, q⁴ is 2, B3′ is 2′-OMe or 2′-F, q⁵ is 5, T3′ is 2′-F, q⁶ is 1, B4′ is 2′-F, and q⁷ is 1. The dsRNAi RNA agent also comprises a 5′-PS₂.

[0394] In one embodiment, B1 is 2′-OMe or 2′-F, n¹ is 8, T1 is 2′F, n² is 3, B2 is 2′-OMe, n³ is 7, n⁴ is 0, B3 is 2′OMe, n⁵ is 3, B1′ is 2′-OMe or 2′-F, q¹ is 9, T1′ is 2′-F, q² is 1, B2′ is 2′-OMe or 2′-F, q³ is 4, T2′ is 2′-F, q⁴ is 2, B3′ is 2′-OMe or 2′-F, q⁵ is 5, T3′ is 2′-F, q⁶ is 1, B4′ is 2′-F, and q⁷ is 1. The RNAi agent also comprises a 5′-deoxy-5′-C-malonyl.

[0395] In one embodiment, B1 is 2′-OMe or 2′-F, n¹ is 8, T1 is 2′F, n² is 3, B2 is 2′-OMe, n³ is 7, n⁴ is 0, B3 is 2′-OMe, n⁵ is 3, B1′ is 2′-OMe or 2′-F, q¹ is 9, T1′ is 2′-F, q² is 1, B2′ is 2′-OMe or 2′-F, q³ is 4, T2′ is 2′-F, q⁴ is 2, B3′ is 2′-OMe or 2′-F, q⁵ is 5, T3′ is 2′-F, q⁶ is 1, B4′ is 2′-F, and q⁷ is 1; with two phosphorothioate internucleotide linkage modifications within position 1-5 of the sense strand (counting from the 5′-end of the sense strand), and two phosphorothioate internucleotide linkage modifications at positions 1 and 2 and two phosphorothioate internucleotide linkage modifications within positions 18-23 of the antisense strand (counting from the 5′-end of the antisense strand). The RNAi agent also comprises a 5′-P.

[0396] In one embodiment, B1 is 2′-OMe or 2′-F, n¹ is 8, T1 is 2′F, n² is 3, B2 is 2′-OMe, n³ is 7, n⁴ is 0, B3 is 2′-OMe, n⁵ is 3, B1′ is 2′-OMe or 2′-F, q¹ is 9, T1′ is 2′-F, q² is 1, B2′ is 2′-OMe or 2′-F, q³ is 4, T2′ is 2′-F, q⁴ is 2, B3′ is 2′-OMe or 2′-F, q⁵ is 5, T3′ is 2′-F, q⁶ is 1, B4′ is 2′-F, and q⁷ is 1; with two phosphorothioate internucleotide linkage modifications within position 1-5 of the sense strand (counting from the 5′-end of the sense strand), and two phosphorothioate internucleotide linkage modifications at positions 1 and 2 and two phosphorothioate internucleotide linkage modifications within positions 18-23 of the antisense strand (counting from the 5′-end of the antisense strand). The RNAi agent also comprises a 5′-PS.

[0397] In one embodiment, B1 is 2′-OMe or 2′-F, n¹ is 8, T1 is 2′F, n² is 3, B2 is 2′-OMe, n³ is 7, n⁴ is 0, B3 is 2′-OMe, n⁵ is 3, B1′ is 2′-OMe or 2′-F, q¹ is 9, T1′ is 2′-F, q² is 1, B2′ is 2′-OMe or 2′-F, q³ is 4, T2′ is 2′-F, q⁴ is 2, B3′ is 2′-OMe or 2′-F, q⁵ is 5, T3′ is 2′-F, q⁶ is 1, B4′ is 2′-F, and q⁷ is 1; with two phosphorothioate internucleotide linkage modifications within position 1-5 of the sense strand (counting from the 5′-end of the sense strand), and two phosphorothioate internucleotide linkage modifications at positions 1 and 2 and two phosphorothioate internucleotide linkage modifications within positions 18-23 of the antisense strand (counting from the 5′-end of the antisense strand). The RNAi agent also comprises a 5′-VP. The 5′-VP may be 5′-E-VP, 5′-Z—VP, or combination thereof.

[0398] In one embodiment, B1 is 2′-OMe or 2′-F, n¹ is 8, T1 is 2′F, n² is 3, B2 is 2′-OMe, n³ is 7, n⁴ is 0, B3 is 2′-OMe, n⁵ is 3, B1′ is 2′-OMe or 2′-F, q¹ is 9, T1′ is 2′-F, q² is 1, B2′ is 2′-OMe or 2′-F, q³ is 4, T2′ is 2′-F, q⁴ is 2, B3′ is 2′-OMe or 2′-F, q⁵ is 5, T3′ is 2′-F, q⁶ is 1, B4′ is 2′-F, and q⁷ is 1; with two phosphorothioate internucleotide linkage modifications within position 1-5 of the sense strand (counting from the 5′-end of the sense strand), and two phosphorothioate internucleotide linkage modifications at positions 1 and 2 and two phosphorothioate internucleotide linkage modifications within positions 18-23 of the antisense strand (counting from the 5′-end of the antisense strand). The RNAi agent also comprises a 5′-PS₂.

[0399] In one embodiment, B1 is 2′-OMe or 2′-F, n¹ is 8, T1 is 2′F, n² is 3, B2 is 2′-OMe, n³ is 7, n⁴ is 0, B3 is 2′-OMe, n⁵ is 3, B1′ is 2′-OMe or 2′-F, q¹ is 9, T1′ is 2′-F, q² is 1, B2′ is 2′-OMe or 2′-F, q³ is 4, T2′ is 2′-F, q⁴ is 2, B3′ is 2′-OMe or 2′-F, q⁵ is 5, T3′ is 2′-F, q⁶ is 1, B4′ is 2′-F, and q⁷ is 1; with two phosphorothioate internucleotide linkage modifications within position 1-5 of the sense strand (counting from the 5′-end of the sense strand), and two phosphorothioate internucleotide linkage modifications at positions 1 and 2 and two phosphorothioate internucleotide linkage modifications within positions 18-23 of the antisense strand (counting from the 5′-end of the antisense strand). The RNAi agent also comprises a 5′-deoxy-5′-C-malonyl.

[0400] In one embodiment, B1 is 2′-OMe or 2′-F, n¹ is 8, T1 is 2′F, n² is 3, B2 is 2′-OMe, n³ is 7, n⁴ is 0, B3 is 2′-OMe, n⁵ is 3, B1′ is 2′-OMe or 2′-F, q¹ is 9, T1′ is 2′-F, q² is 1, B2′ is 2′-OMe or 2′-F, q³ is 4, q⁴ is 0, B3′ is 2′-OMe or 2′-F, q⁵ is 7, T3′ is 2′-F, q⁶ is 1, B4′ is 2′-F, and q⁷ is 1. The RNAi agent also comprises a 5′-P.

[0401] In one embodiment, B1 is 2′-OMe or 2′-F, n¹ is 8, T1 is 2′F, n² is 3, B2 is 2′-OMe, n³ is 7, n⁴ is 0, B3 is 2′-OMe, n⁵ is 3, B1′ is 2′-OMe or 2′-F, q¹ is 9, T1′ is 2′-F, q² is 1, B2′ is 2′-OMe or 2′-F, q³ is 4, q⁴ is 0. B3′ is 2′-OMe or 2′-F, q⁵ is 7, T3′ is 2′-F, q⁶ is 1, B4′ is 2′-F, and q⁷ is 1. The RNAi agent also comprises a 5′-PS.

[0402] In one embodiment, B1 is 2′-OMe or 2′-F, n¹ is 8, T1 is 2′F, n² is 3, B2 is 2′-OMe, n³ is 7, n⁴ is 0, B3 is 2′-OMe, n⁵ is 3. B1′ is 2′-OMe or 2′-F, q¹ is 9, T1′ is 2′-F, q² is 1, B2′ is 2′-OMe or 2′-F, q³ is 4, q⁴ is 0, B3′ is 2′-OMe or 2′-F, q⁵ is 7, T3′ is 2′-F, q⁶ is 1, B4′ is 2′-F, and q⁷ is 1. The RNAi agent also comprises a 5′-VP. The 5′-VP may be 5′-E-VP. 5′-Z—VP, or combination thereof.

[0403] In one embodiment, B1 is 2′-OMe or 2′-F, n¹ is 8, T1 is 2′F, n² is 3, B2 is 2′-OMe, n³ is 7, n⁴ is 0, B3 is 2′-OMe, n⁵ is 3, B1′ is 2′-OMe or 2′-F, q¹ is 9, T1′ is 2′-F, q² is 1, B2′ is 2′-OMe or 2′-F, q³ is 4, q⁴ is 0, B3′ is 2′-OMe or 2′-F, q⁵ is 7, T3′ is 2′-F, q⁶ is 1, B4′ is 2′-F, and q⁷ is 1. The RNAi agent also comprises a 5′-PS₂.

[0404] In one embodiment, B1 is 2′-OMe or 2′-F, n¹ is 8, T1 is 2′F, n² is 3, B2 is 2′-OMe, n³ is 7, n⁴ is 0, B3 is 2′-OMe, n⁵ is 3, B1′ is 2′-OMe or 2′-F, q¹ is 9, T1′ is 2′-F, q² is 1, B2′ is 2′-OMe or 2′-F, q³ is 4, q⁴ is 0, B3′ is 2′-OMe or 2′-F, q⁵ is 7, T3′ is 2′-F, q⁶ is 1, B4′ is 2′-F, and q⁷ is 1. The RNAi agent also comprises a 5′-deoxy-5′-C-malonyl.

[0405] In one embodiment, B1 is 2′-OMe or 2′-F, n¹ is 8, T1 is 2′F, n² is 3, B2 is 2′-OMe, n³ is 7, n⁴ is 0, B3 is 2′-OMe, n⁵ is 3, B1′ is 2′-OMe or 2′-F, q¹ is 9, T1′ is 2′-F, q² is 1, B2′ is 2′-OMe or 2′-F, q³ is 4, q⁴ is 0, B3′ is 2′-OMe or 2′-F, q⁵ is 7, T3′ is 2′-F, q⁶ is 1, B4′ is 2′-F, and q⁷ is 1; with two phosphorothioate internucleotide linkage modifications within position 1-5 of the sense strand (counting from the 5′-end of the sense strand), and two phosphorothioate internucleotide linkage modifications at positions 1 and 2 and two phosphorothioate internucleotide linkage modifications within positions 18-23 of the antisense strand (counting from the 5′-end of the antisense strand). The RNAi agent also comprises a 5′-P.

[0406] In one embodiment, B1 is 2′-OMe or 2′-F, n¹ is 8, T1 is 2′F, n² is 3, B2 is 2′-OMe, n³ is 7, n⁴ is 0, B3 is 2′-OMe, n⁵ is 3, B1′ is 2′-OMe or 2′-F, q¹ is 9, T1′ is 2′-F, q² is 1, B2′ is 2′-OMe or 2′-F, q³ is 4, q⁴ is 0, B3′ is 2′-OMe or 2′-F, q⁵ is 7, T3′ is 2′-F, q⁶ is 1, B4′ is 2′-F, and q⁷ is 1; with two phosphorothioate internucleotide linkage modifications within position 1-5 of the sense strand (counting from the 5′-end of the sense strand), and two phosphorothioate internucleotide linkage modifications at positions 1 and 2 and two phosphorothioate internucleotide linkage modifications within positions 18-23 of the antisense strand (counting from the 5′-end of the antisense strand). The RNAi agent also comprises a 5′-PS.

[0407] In one embodiment, B1 is 2′-OMe or 2′-F, n¹ is 8, T1 is 2′F, n¹ is 3, B2 is 2′-OMe, n³ is 7, n⁴ is 0, B3 is 2′-OMe, n⁵ is 3, B1′ is 2′-OMe or 2′-F, q¹ is 9, T1′ is 2′-F, q² is 1, B2′ is 2′-OMe or 2′-F, q³ is 4, q⁴ is 0, B3′ is 2′-OMe or 2′-F, q⁵ is 7, T3′ is 2′-F, q⁶ is 1, B4′ is 2′-F, and q⁷ is 1; with two phosphorothioate internucleotide linkage modifications within position 1-5 of the sense strand (counting from the 5′-end of the sense strand), and two phosphorothioate internucleotide linkage modifications at positions 1 and 2 and two phosphorothioate internucleotide linkage modifications within positions 18-23 of the antisense strand (counting from the 5′-end of the antisense strand). The RNAi agent also comprises a 5′-VP. The 5′-VP may be 5′-E-VP. 5′-Z—VP, or combination thereof.

[0408] In one embodiment, B1 is 2′-OMe or 2′-F, n¹ is 8, T1 is 2′F, n² is 3, B2 is 2′-OMe, n³ is 7, n⁴ is 0, B3 is 2′-OMe, n⁵ is 3, B1′ is 2′-OMe or 2′-F, q¹ is 9, T1′ is 2′-F, q² is 1, B2′ is 2′-OMe or 2′-F, q³ is 4, q⁴ is 0, B3′ is 2′-OMe or 2′-F, q⁵ is 7, T3′ is 2′-F, q⁶ is 1, B4′ is 2′-F, and q⁷ is 1; with two phosphorothioate internucleotide linkage modifications within position 1-5 of the sense strand (counting from the 5′-end of the sense strand), and two phosphorothioate internucleotide linkage modifications at positions 1 and 2 and two phosphorothioate internucleotide linkage modifications within positions 18-23 of the antisense strand (counting from the 5′-end of the antisense strand). The RNAi agent also comprises a 5′-PS₂.

[0409] In one embodiment, B1 is 2′-OMe or 2′-F, n¹ is 8, T1 is 2′F, n² is 3, B2 is 2′-OMe, n³ is 7, n⁴ is 0, B3 is 2′-OMe, n⁵ is 3, B1′ is 2′-OMe or 2′-F, q¹ is 9, T1′ is 2′-F, q² is 1, B2′ is 2′-OMe or 2′-F, q³ is 4, q⁴ is 0, B3′ is 2′-OMe or 2′-F, q⁵ is 7, T3′ is 2′-F, q⁶ is 1, B4′ is 2′-F, and q⁷ is 1; with two phosphorothioate internucleotide linkage modifications within position 1-5 of the sense strand (counting from the 5′-end of the sense strand), and two phosphorothioate internucleotide linkage modifications at positions 1 and 2 and two phosphorothioate internucleotide linkage modifications within positions 18-23 of the antisense strand (counting from the 5′-end of the antisense strand). The RNAi agent also comprises a 5′-deoxy-5′-C-malonyl.

[0410] In one embodiment, B1 is 2′-OMe or 2′-F, n¹ is 8, T1 is 2′F, n¹ is 3, B2 is 2′-OMe, n³ is 7, n⁴ is 0, B3 is 2′-OMe, n⁵ is 3, B1′ is 2′-OMe or 2′-F, q¹ is 9, T1′ is 2′-F, q² is 1, B2′ is 2′-OMe or 2′-F, q¹ is 4, T2′ is 2′-F, q⁴ is 2, B3′ is 2′-OMe or 2′-F, q⁵ is 5, T3′ is 2′-F, q⁶ is 1, B4′ is 2′-OMe, and q⁷ is 1; with two phosphorothioate internucleotide linkage modifications within position 1-5 of the sense strand (counting from the 5′-end of the sense strand), and two phosphorothioate internucleotide linkage modifications at positions 1 and 2 and two phosphorothioate internucleotide linkage modifications within positions 18-23 of the antisense strand (counting from the 5′-end of the antisense strand). The RNAi agent also comprises a 5′-P and a targeting ligand. In one embodiment, the 5′-P is at the 5′-end of the antisense strand, and the targeting ligand is at the 3′-end of the sense strand.

[0411] In one embodiment, B1 is 2′-OMe or 2′-F, n¹ is 8, T1 is 2′F, n² is 3, B2 is 2′-OMe, n³ is 7, n⁴ is 0, B3 is 2′-OMe, n⁵ is 3, B1′ is 2′-OMe or 2′-F, q¹ is 9, T1′ is 2′-F, q² is 1, B2′ is 2′-OMe or 2′-F, q³ is 4. T2′ is 2′-F, q⁴ is 2, B3′ is 2′-OMe or 2′-F, q⁵ is 5, T3′ is 2′-F, q⁶ is 1, B4′ is 2′-OMe, and q⁷ is 1; with two phosphorothioate internucleotide linkage modifications within position 1-5 of the sense strand (counting from the 5′-end of the sense strand), and two phosphorothioate internucleotide linkage modifications at positions 1 and 2 and two phosphorothioate internucleotide linkage modifications within positions 18-23 of the antisense strand (counting from the 5′-end of the antisense strand). The RNAi agent also comprises a 5′-PS and a targeting ligand. In one embodiment, the 5′-PS is at the 5′-end of the antisense strand, and the targeting ligand is at the 3′-end of the sense strand.

[0412] In one embodiment, B1 is 2′-OMe or 2′-F, n¹ is 8, T1 is 2′F, n¹ is 3, B2 is 2′-OMe, n³ is 7, n⁴ is 0, B3 is 2′-OMe, n⁵ is 3, B1′ is 2′-OMe or 2′-F, q¹ is 9, T1′ is 2′-F, q² is 1, B2′ is 2′-OMe or 2′-F, q¹ is 4, T2′ is 2′-F, q⁴ is 2, B3′ is 2′-OMe or 2′-F, q⁵ is 5, T3′ is 2′-F, q⁶ is 1, B4′ is 2′-OMe, and q⁷ is 1; with two phosphorothioate internucleotide linkage modifications within position 1-5 of the sense strand (counting from the 5′-end of the sense strand), and two phosphorothioate internucleotide linkage modifications at positions 1 and 2 and two phosphorothioate internucleotide linkage modifications within positions 18-23 of the antisense strand (counting from the 5′-end of the antisense strand). The RNAi agent also comprises a 5′-VP (e.g., a 5′-E-VP, 5′-Z—VP, or combination thereof), and a targeting ligand.

[0413] In one embodiment, the 5′-VP is at the 5′-end of the antisense strand, and the targeting ligand is at the 3′-end of the sense strand.

[0414] In one embodiment, B1 is 2′-OMe or 2′-F, n¹ is 8. T1 is 2′F, n² is 3, B2 is 2′-OMe, n³ is 7, n⁴ is 0, B3 is 2′-OMe, n⁵ is 3, B1′ is 2′-OMe or 2′-F, q¹ is 9, T1′ is 2′-F, q² is 1, B2′ is 2′-OMe or 2′-F, q³ is 4, T2′ is 2′-F, q⁴ is 2, B3′ is 2′-OMe or 2′-F, q⁵ is 5, T3′ is 2′-F, q⁶ is 1, B4′ is 2′-OMe, and q⁷ is 1; with two phosphorothioate internucleotide linkage modifications within position 1-5 of the sense strand (counting from the 5′-end of the sense strand), and two phosphorothioate internucleotide linkage modifications at positions 1 and 2 and two phosphorothioate internucleotide linkage modifications within positions 18-23 of the antisense strand (counting from the 5′-end of the antisense strand). The RNAi agent also comprises a 5′-PS₂ and a targeting ligand. In one embodiment, the 5′-PS₂ is at the 5′-end of the antisense strand, and the targeting ligand is at the 3′-end of the sense strand. In one embodiment, B1 is 2′-OMe or 2′-F, n¹ is 8, T1 is 2′F, n¹ is 3, B2 is 2′-OMe, n³ is 7, n⁴ is 0, B3 is 2′-OMe, n⁵ is 3, B1′ is 2′-OMe or 2′-F, q¹ is 9, T1′ is 2′-F, q² is 1, B2′ is 2′-OMe or 2′-F, q¹ is 4, T2′ is 2′-F, q⁴ is 2, B3′ is 2′-OMe or 2′-F, q⁵ is 5, T3′ is 2′-F, q⁶ is 1, B4′ is 2′-OMe, and q⁷ is 1; with two phosphorothioate internucleotide linkage modifications within position 1-5 of the sense strand (counting from the 5′-end of the sense strand), and two phosphorothioate internucleotide linkage modifications at positions 1 and 2 and two phosphorothioate internucleotide linkage modifications within positions 18-23 of the antisense strand (counting from the 5′-end of the antisense strand). The RNAi agent also comprises a 5′-deoxy-5′-C-malonyl and a targeting ligand. In one embodiment, the 5′-deoxy-5′-C-malonyl is at the 5′-end of the antisense strand, and the targeting ligand is at the 3′-end of the sense strand.

[0415] In one embodiment, B1 is 2′-OMe or 2′-F, n¹ is 8, T1 is 2′F, n² is 3, B2 is 2′-OMe, n³ is 7, n⁴ is 0, B3 is 2′-OMe, n⁵ is 3, B1′ is 2′-OMe or 2′-F, q¹ is 9, T1′ is 2′-F, q² is 1, B2′ is 2′-OMe or 2′-F, q³ is 4, q⁴ is 0, B3′ is 2′-OMe or 2′-F, q⁵ is 7, T3′ is 2′-F, q⁶ is 1, B4′ is 2′-OMe, and q⁷ is 1; with two phosphorothioate internucleotide linkage modifications within position 1-5 of the sense strand (counting from the 5′-end), and two phosphorothioate internucleotide linkage modifications at positions 1 and 2 and two phosphorothioate internucleotide linkage modifications within positions 18-23 of the antisense strand (counting from the 5′-end). The RNAi agent also comprises a 5′-P and a targeting ligand. In one embodiment, the 5′-P is at the 5′-end of the antisense strand, and the targeting ligand is at the 3′-end of the sense strand.

[0416] In one embodiment, B1 is 2′-OMe or 2′-F, n¹ is 8, T1 is 2′F, n² is 3, B2 is 2′-OMe, n³ is 7, n⁴ is 0, B3 is 2′-OMe, n⁵ is 3, B1′ is 2′-OMe or 2′-F, q¹ is 9, T1′ is 2′-F, q² is 1, B2′ is 2′-OMe or 2′-F, q³ is 4, q⁴ is 0, B3′ is 2′-OMe or 2′-F, q⁵ is 7, T3′ is 2′-F, q⁶ is 1, B4′ is 2′-OMe, and q⁷ is 1; with two phosphorothioate internucleotide linkage modifications within position 1-5 of the sense strand (counting from the 5′-end), and two phosphorothioate internucleotide linkage modifications at positions 1 and 2 and two phosphorothioate internucleotide linkage modifications within positions 18-23 of the antisense strand (counting from the 5′-end). The RNAi agent also comprises a 5′-PS and a targeting ligand. In one embodiment, the 5′-PS is at the 5′-end of the antisense strand, and the targeting ligand is at the 3′-end of the sense strand.

[0417] In one embodiment, B1 is 2′-OMe or 2′-F, n¹ is 8, T1 is 2′F, n² is 3, B2 is 2′-OMe, n³ is 7, n⁴ is 0, B3 is 2′-OMe, n⁵ is 3, B1′ is 2′-OMe or 2′-F, q¹ is 9, T1′ is 2′-F, q² is 1, B2′ is 2′-OMe or 2′-F, q¹ is 4, q⁴ is 0, B3′ is 2′-OMe or 2′-F, q⁵ is 7, T3′ is 2′-F, q⁶ is 1, B4′ is 2′-OMe, and q⁷ is 1; with two phosphorothioate internucleotide linkage modifications within position 1-5 of the sense strand (counting from the 5′-end), and two phosphorothioate internucleotide linkage modifications at positions 1 and 2 and two phosphorothioate internucleotide linkage modifications within positions 18-23 of the antisense strand (counting from the 5′-end). The RNAi agent also comprises a 5′-VP (e.g., a 5′-E-VP. 5′-Z—VP, or combination thereof) and a targeting ligand. In one embodiment, the 5′-VP is at the 5′-end of the antisense strand, and the targeting ligand is at the 3′-end of the sense strand.

[0418] In one embodiment, B1 is 2′-OMe or 2′-F, n¹ is 8, T1 is 2′F, n² is 3, B2 is 2′-OMe, n³ is 7, n⁴ is 0, B3 is 2′-OMe, n⁵ is 3, B1′ is 2′-OMe or 2′-F, q¹ is 9, T1′ is 2′-F, q² is 1, B2′ is 2′-OMe or 2′-F, q¹ is 4, q⁴ is 0, B3′ is 2′-OMe or 2′-F, q⁵ is 7, T3′ is 2′-F, q⁶ is 1, B4′ is 2′-OMe, and q⁷ is 1; with two phosphorothioate internucleotide linkage modifications within position 1-5 of the sense strand (counting from the 5′-end), and two phosphorothioate internucleotide linkage modifications at positions 1 and 2 and two phosphorothioate internucleotide linkage modifications within positions 18-23 of the antisense strand (counting from the 5′-end). The RNAi agent also comprises a 5′-PS₂ and a targeting ligand. In one embodiment, the 5′-PS₂ is at the 5′-end of the antisense strand, and the targeting ligand is at the 3′-end of the sense strand.

[0419] In one embodiment, B1 is 2′-OMe or 2′-F, n¹ is 8. T1 is 2′F, n² is 3, B2 is 2′-OMe, n³ is 7, n⁴ is 0, B3 is 2′-OMe, n⁵ is 3, B1′ is 2′-OMe or 2′-F, q¹ is 9, T1′ is 2′-F, q² is 1, B2′ is 2′-OMe or 2′-F, q³ is 4, q⁴ is 0, B3′ is 2′-OMe or 2′-F, q⁵ is 7, T3′ is 2′-F, q⁶ is 1, B4′ is 2′-OMe, and q⁷ is 1; with two phosphorothioate internucleotide linkage modifications within position 1-5 of the sense strand (counting from the 5′-end), and two phosphorothioate internucleotide linkage modifications at positions 1 and 2 and two phosphorothioate internucleotide linkage modifications within positions 18-23 of the antisense strand (counting from the 5′-end). The RNAi agent also comprises a 5′-deoxy-5′-C-malonyl and a targeting ligand. In one embodiment, the 5′-deoxy-5′-C-malonyl is at the 5′-end of the antisense strand, and the targeting ligand is at the 3′-end of the sense strand.

[0420] In one embodiment, B1 is 2′-OMe or 2′-F, n¹ is 8, T1 is 2′F, n¹ is 3, B2 is 2′-OMe, n³ is 7, n⁴ is 0, B3 is 2′-OMe, n⁵ is 3, B1′ is 2′-OMe or 2′-F, q¹ is 9, T1′ is 2′-F, q² is 1, B2′ is 2′-OMe or 2′-F, q³ is 4, T2′ is 2′-F, q⁴ is 2, B3′ is 2′-OMe or 2′-F, q⁵ is 5, T3′ is 2′-F, q¹ is 1, B4′ is 2′-F, and q⁷ is 1; with two phosphorothioate internucleotide linkage modifications within position 1-5 of the sense strand (counting from the 5′-end of the sense strand), and two phosphorothioate internucleotide linkage modifications at positions 1 and 2 and two phosphorothioate internucleotide linkage modifications within positions 18-23 of the antisense strand (counting from the 5′-end of the antisense strand). The RNAi agent also comprises a 5′-P and a targeting ligand. In one embodiment, the 5′-P is at the 5′-end of the antisense strand, and the targeting ligand is at the 3′-end of the sense strand.

[0421] In one embodiment, B1 is 2′-OMe or 2′-F, n¹ is 8, T1 is 2′F, n² is 3, B2 is 2′-OMe, n³ is 7, n⁴ is 0, B3 is 2′-OMe, n⁵ is 3, B1′ is 2′-OMe or 2′-F, q¹ is 9, T1′ is 2′-F, q² is 1, B2′ is 2′-OMe or 2′-F, q³ is 4, T2′ is 2′-F, q⁴ is 2, B3′ is 2′-OMe or 2′-F, q⁵ is 5, T3′ is 2′-F, q⁶ is 1, B4′ is 2′-F, and q⁷ is 1; with two phosphorothioate internucleotide linkage modifications within position 1-5 of the sense strand (counting from the 5′-end of the sense strand), and two phosphorothioate internucleotide linkage modifications at positions 1 and 2 and two phosphorothioate internucleotide linkage modifications within positions 18-23 of the antisense strand (counting from the 5′-end of the antisense strand). The RNAi agent also comprises a 5′-PS and a targeting ligand. In one embodiment, the 5′-PS is at the 5′-end of the antisense strand, and the targeting ligand is at the 3′-end of the sense strand.

[0422] In one embodiment, B1 is 2′-OMe or 2′-F, n¹ is 8, T1 is 2′F, n² is 3, B2 is 2′-OMe, n³ is 7, n⁴ is 0, B3 is 2′-OMe, n⁵ is 3, B1′ is 2′-OMe or 2′-F, q¹ is 9, T1′ is 2′-F, q² is 1, B2′ is 2′-OMe or 2′-F, q³ is 4, T2′ is 2′-F, q⁴ is 2, B3′ is 2′-OMe or 2′-F, q⁵ is 5, T3′ is 2′-F, q⁶ is 1, B4′ is 2′-F, and q⁷ is 1; with two phosphorothioate internucleotide linkage modifications within position 1-5 of the sense strand (counting from the 5′-end of the sense strand), and two phosphorothioate internucleotide linkage modifications at positions 1 and 2 and two phosphorothioate internucleotide linkage modifications within positions 18-23 of the antisense strand (counting from the 5′-end of the antisense strand). The RNAi agent also comprises a 5′-VP (e.g., a 5′-E-VP. 5′-Z—VP, or combination thereof) and a targeting ligand. In one embodiment, the 5′-VP is at the 5′-end of the antisense strand, and the targeting ligand is at the 3′-end of the sense strand.

[0423] In one embodiment, B1 is 2′-OMe or 2′-F, n¹ is 8, T1 is 2′F, n¹ is 3, B2 is 2′-OMe, n³ is 7, n⁴ is 0, B3 is 2′-OMe, n⁵ is 3, B1′ is 2′-OMe or 2′-F, q¹ is 9, T1′ is 2′-F, q² is 1, B2′ is 2′-OMe or 2′-F, q³ is 4, T2′ is 2′-F, q⁴ is 2, B3′ is 2′-OMe or 2′-F, q⁵ is 5, T3′ is 2′-F, q⁶ is 1, B4′ is 2′-F, and q⁷ is 1; with two phosphorothioate internucleotide linkage modifications within position 1-5 of the sense strand (counting from the 5′-end of the sense strand), and two phosphorothioate internucleotide linkage modifications at positions 1 and 2 and two phosphorothioate internucleotide linkage modifications within positions 18-23 of the antisense strand (counting from the 5′-end of the antisense strand). The RNAi agent also comprises a 5′-PS₂ and a targeting ligand. In one embodiment, the 5′-PS₂ is at the 5′-end of the antisense strand, and the targeting ligand is at the 3′-end of the sense strand.

[0424] In one embodiment, B1 is 2′-OMe or 2′-F, n¹ is 8, T1 is 2′F, n² is 3, B2 is 2′-OMe, n³ is 7, n⁴ is 0, B3 is 2′-OMe, n⁵ is 3, B1′ is 2′-OMe or 2′-F, q¹ is 9, T1′ is 2′-F, q² is 1, B2′ is 2′-OMe or 2′-F, q³ is 4, T2′ is 2′-F, q⁴ is 2, B3′ is 2′-OMe or 2′-F, q⁵ is 5, T3′ is 2′-F, q⁶ is 1, B4′ is 2′-F, and q⁷ is 1; with two phosphorothioate internucleotide linkage modifications within position 1-5 of the sense strand (counting from the 5′-end of the sense strand), and two phosphorothioate internucleotide linkage modifications at positions 1 and 2 and two phosphorothioate internucleotide linkage modifications within positions 18-23 of the antisense strand (counting from the 5′-end of the antisense strand). The RNAi agent also comprises a 5′-deoxy-5′-C-malonyl and a targeting ligand. In one embodiment, the 5′-deoxy-5′-C-malonyl is at the 5′-end of the antisense strand, and the targeting ligand is at the 3′-end of the sense strand.

[0425] In one embodiment, B1 is 2′-OMe or 2′-F, n¹ is 8, T1 is 2′F, n² is 3, B2 is 2′-OMe, n³ is 7, n⁴ is 0, B3 is 2′-OMe, n⁵ is 3, B1′ is 2′-OMe or 2′-F, q¹ is 9, T1′ is 2′-F, q² is 1, B2′ is 2′-OMe or 2′-F, q¹ is 4, q⁴ is 0, B3′ is 2′-OMe or 2′-F, q⁵ is 7, T3′ is 2′-F, q⁶ is 1, B4′ is 2′-F, and q⁷ is 1; with two phosphorothioate internucleotide linkage modifications within position 1-5 of the sense strand (counting from the 5′-end of the sense strand), and two phosphorothioate internucleotide linkage modifications at positions 1 and 2 and two phosphorothioate internucleotide linkage modifications within positions 18-23 of the antisense strand (counting from the 5′-end of the antisense strand). The RNAi agent also comprises a 5′-P and a targeting ligand. In one embodiment, the 5′-P is at the 5′-end of the antisense strand, and the targeting ligand is at the 3′-end of the sense strand.

[0426] In one embodiment, B1 is 2′-OMe or 2′-F, n¹ is 8, T1 is 2′F, n² is 3, B2 is 2′-OMe, n³ is 7, n⁴ is 0, B3 is 2′-OMe, n⁵ is 3, B1′ is 2′-OMe or 2′-F, q¹ is 9, T1′ is 2′-F, q² is 1, B2′ is 2′-OMe or 2′-F, q³ is 4, q⁴ is 0, B3′ is 2′-OMe or 2′-F, q⁵ is 7, T3′ is 2′-F, q⁶ is 1, B4′ is 2′-F, and q⁷ is 1; with two phosphorothioate internucleotide linkage modifications within position 1-5 of the sense strand (counting from the 5′-end of the sense strand), and two phosphorothioate internucleotide linkage modifications at positions 1 and 2 and two phosphorothioate internucleotide linkage modifications within positions 18-23 of the antisense strand (counting from the 5′-end of the antisense strand). The RNAi agent also comprises a 5′-PS and a targeting ligand. In one embodiment, the 5′-PS is at the 5′-end of the antisense strand, and the targeting ligand is at the 3′-end of the sense strand.

[0427] In one embodiment, B1 is 2′-OMe or 2′-F, n¹ is 8, T1 is 2′F, n² is 3, B2 is 2′-OMe, n³ is 7, n⁴ is 0, B3 is 2′-OMe, n⁵ is 3, B1′ is 2′-OMe or 2′-F, q¹ is 9, T1′ is 2′-F, q² is 1, B2′ is 2′-OMe or 2′-F, q³ is 4, q⁴ is 0, B3′ is 2′-OMe or 2′-F, q⁵ is 7, T3′ is 2′-F, q⁶ is 1, B4′ is 2′-F, and q⁷ is 1; with two phosphorothioate internucleotide linkage modifications within position 1-5 of the sense strand (counting from the 5′-end of the sense strand), and two phosphorothioate internucleotide linkage modifications at positions 1 and 2 and two phosphorothioate internucleotide linkage modifications within positions 18-23 of the antisense strand (counting from the 5′-end of the antisense strand). The RNAi agent also comprises a 5′-VP (e.g., a 5′-E-VP, 5′-Z—VP, or combination thereof) and a targeting ligand. In one embodiment, the 5′-VP is at the 5′-end of the antisense strand, and the targeting ligand is at the 3′-end of the sense strand.

[0428] In one embodiment, B1 is 2′-OMe or 2′-F, n¹ is 8, T1 is 2′F, n¹ is 3, B2 is 2′-OMe, n³ is 7, n⁴ is 0, B3 is 2′-OMe, n⁵ is 3, B1′ is 2′-OMe or 2′-F, q¹ is 9, T1′ is 2′-F, q² is 1, B2′ is 2′-OMe or 2′-F, q³ is 4, q⁴ is 0, B3′ is 2′-OMe or 2′-F, q⁵ is 7, T3′ is 2′-F, q⁶ is 1, B4′ is 2′-F, and q⁷ is 1; with two phosphorothioate internucleotide linkage modifications within position 1-5 of the sense strand (counting from the 5′-end of the sense strand), and two phosphorothioate internucleotide linkage modifications at positions 1 and 2 and two phosphorothioate internucleotide linkage modifications within positions 18-23 of the antisense strand (counting from the 5′-end of the antisense strand). The RNAi agent also comprises a 5′-PS₂ and a targeting ligand. In one embodiment, the 5′-PS₂ is at the 5′-end of the antisense strand, and the targeting ligand is at the 3′-end of the sense strand.

[0429] In one embodiment, B1 is 2′-OMe or 2′-F, n¹ is 8, T1 is 2′F, n² is 3, B2 is 2′-OMe, n³ is 7, n⁴ is 0, B3 is 2′-OMe, n⁵ is 3, B1′ is 2′-OMe or 2′-F, q¹ is 9, T1′ is 2′-F, q² is 1, B2′ is 2′-OMe or 2′-F, q¹ is 4, q⁴ is 0, B3′ is 2′-OMe or 2′-F, q⁵ is 7, T3′ is 2′-F, q⁶ is 1, B4′ is 2′-F, and q⁷ is 1; with two phosphorothioate internucleotide linkage modifications within position 1-5 of the sense strand (counting from the 5′-end of the sense strand), and two phosphorothioate internucleotide linkage modifications at positions 1 and 2 and two phosphorothioate internucleotide linkage modifications within positions 18-23 of the antisense strand (counting from the 5′-end of the antisense strand). The RNAi agent also comprises a 5′-deoxy-5′-C-malonyl and a targeting ligand. In one embodiment, the 5′-deoxy-5′-C-malonyl is at the 5′-end of the antisense strand, and the targeting ligand is at the 3′-end of the sense strand.

[0430] In a particular embodiment, an RNAi agent of the present invention comprises:
[0431] (a) a sense strand having:
   [0432] (i) a length of 21 nucleotides;
   [0433] (ii) an ASGPR ligand attached to the 3′-end, wherein said ASGPR ligand comprises three GalNAc derivatives attached through a trivalent branched linker; and
   [0434] (iii) 2′-F modifications at positions 1, 3, 5, 7, 9 to 11, 13, 17, 19, and 21, and 2′-OMe modifications at positions 2, 4, 6, 8, 12, 14 to 16, 18, and 20 (counting from the 5′ end);
[0435] and
[0436] (b) an antisense strand having:
   [0437] (i) a length of 23 nucleotides;
   [0438] (ii) 2′-OMe modifications at positions 1, 3, 5, 9, 11 to 13, 15, 17, 19, 21, and 23, and 2′F modifications at positions 2, 4, 6 to 8, 10, 14, 16, 18, 20, and 22 (counting from the 5′ end); and
   [0439] (iii) phosphorothioate internucleotide linkages between nucleotide positions 21 and 22, and between nucleotide positions 22 and 23 (counting from the 5′ end);
[0440] wherein the dsRNA agents have a two nucleotide overhang at the 3′-end of the antisense strand, and a blunt end at the 5′-end of the antisense strand.

[0441] In another particular embodiment, an RNAi agent of the present invention comprises:
[0442] (a) a sense strand having:
[0443] (i) a length of 21 nucleotides;
[0444] (ii) an ASGPR ligand attached to the 3′-end, wherein said ASGPR ligand comprises three GalNAc derivatives attached through a trivalent branched linker;
[0445] (iii) 2′-F modifications at positions 1, 3, 5, 7, 9 to 11, 13, 15, 17, 19, and 21, and 2′-OMe modifications at positions 2, 4, 6, 8, 12, 14, 16, 18, and 20 (counting from the 5′ end); and
[0446] (iv) phosphorothioate internucleotide linkages between nucleotide positions 1 and 2, and between nucleotide positions 2 and 3 (counting from the 5′ end);
[0447] and
[0448] (b) an antisense strand having:
   [0449] (i) a length of 23 nucleotides;
   [0450] (ii) 2′-OMe modifications at positions 1, 3, 5, 7, 9, 11 to 13, 15, 17, 19, and 21 to 23, and 2′F modifications at positions 2, 4, 6, 8, 10, 14, 16, 18, and 20 (counting from the 5′ end); and
   [0451] (iii) phosphorothioate internucleotide linkages between nucleotide positions 1 and 2, between nucleotide positions 2 and 3, between nucleotide positions 21 and 22, and between nucleotide positions 22 and 23 (counting from the 5′ end);
      wherein the RNAi agents have a two nucleotide overhang at the 3′-end of the antisense strand, and a blunt end at the 5′-end of the antisense strand.

[0452] In another particular embodiment, a RNAi agent of the present invention comprises:
[0453] (a) a sense strand having:
   [0454] (i) a length of 21 nucleotides;
   [0455] (ii) an ASGPR ligand attached to the 3′-end, wherein said ASGPR ligand comprises three GalNAc derivatives attached through a trivalent branched linker;
   [0456] (iii) 2′-OMe modifications at positions 1 to 6, 8, 10, and 12 to 21, 2′-F modifications at positions 7, and 9, and a deoxy-nucleotide (e.g. dT) at position 11 (counting from the 5′ end); and
   [0457] (iv) phosphorothioate internucleotide linkages between nucleotide positions 1 and 2, and between nucleotide positions 2 and 3 (counting from the 5′ end);
[0458] and
[0459] (b) an antisense strand having:
   [0460] (i) a length of 23 nucleotides;
   [0461] (ii) 2′-OMe modifications at positions 1, 3, 7, 9, 11, 13, 15, 17, and 19 to 23, and 2′-F modifications at positions 2, 4 to 6, 8, 10, 12, 14, 16, and 18 (counting from the 5′ end); and
   [0462] (iii) phosphorothioate internucleotide linkages between nucleotide positions 1 and 2, between nucleotide positions 2 and 3, between nucleotide positions 21 and 22, and between nucleotide positions 22 and 23 (counting from the 5′ end);
      wherein the RNAi agents have a two nucleotide overhang at the 3′-end of the antisense strand, and a blunt end at the 5′-end of the antisense strand.

[0463] In another particular embodiment, a RNAi agent of the present invention comprises:
[0464] (a) a sense strand having:
   [0465] (i) a length of 21 nucleotides;
   [0466] (ii) an ASGPR ligand attached to the 3′-end, wherein said ASGPR ligand comprises three GalNAc derivatives attached through a trivalent branched linker;
   [0467] (iii) 2′-OMe modifications at positions 1 to 6, 8, 10, 12, 14, and 16 to 21, and 2′-F modifications at positions 7, 9, 11, 13, and 15; and
   [0468] (iv) phosphorothioate internucleotide linkages between nucleotide positions 1 and 2, and between nucleotide positions 2 and 3 (counting from the 5′ end);
[0469] and
[0470] (b) an antisense strand having:
   [0471] (i) a length of 23 nucleotides;
   [0472] (ii) 2′-OMe modifications at positions 1, 5, 7, 9, 11, 13, 15, 17, 19, and 21 to 23, and 2′-F modifications at positions 2 to 4, 6, 8, 10, 12, 14, 16, 18, and 20 (counting from the 5′ end); and
   [0473] (iii) phosphorothioate internucleotide linkages between nucleotide positions 1 and 2, between nucleotide positions 2 and 3, between nucleotide positions 21 and 22, and between nucleotide positions 22 and 23 (counting from the 5′ end);
      wherein the RNAi agents have a two nucleotide overhang at the 3′-end of the antisense strand, and a blunt end at the 5′-end of the antisense strand.

[0474] In another particular embodiment, a RNAi agent of the present invention comprises:
[0475] (a) a sense strand having:
   [0476] (i) a length of 21 nucleotides;
   [0477] (ii) an ASGPR ligand attached to the 3′-end, wherein said ASGPR ligand comprises three GalNAc derivatives attached through a trivalent branched linker;
   [0478] (iii) 2′-OMe modifications at positions 1 to 9, and 12 to 21, and 2′-F modifications at positions 10, and 11; and
   [0479] (iv) phosphorothioate internucleotide linkages between nucleotide positions 1 and 2, and between nucleotide positions 2 and 3 (counting from the 5′ end);
[0480] and
[0481] (b) an antisense strand having:
   [0482] (i) a length of 23 nucleotides;
   [0483] (ii) 2′-OMe modifications at positions 1, 3, 5, 7, 9, 11 to 13, 15, 17, 19, and 21 to 23, and 2′-F modifications at positions 2, 4, 6, 8, 10, 14, 16, 18, and 20 (counting from the 5′ end); and
   [0484] (iii) phosphorothioate internucleotide linkages between nucleotide positions 1 and 2, between nucleotide positions 2 and 3, between nucleotide positions 21 and 22, and between nucleotide positions 22 and 23 (counting from the 5′ end);
      wherein the RNAi agents have a two nucleotide overhang at the 3′-end of the antisense strand, and a blunt end at the 5′-end of the antisense strand.

[0485] In another particular embodiment, a RNAi agent of the present invention comprises:
[0486] (a) a sense strand having:
   [0487] (i) a length of 21 nucleotides;
   [0488] (ii) an ASGPR ligand attached to the 3′-end, wherein said ASGPR ligand comprises three GalNAc derivatives attached through a trivalent branched linker;
   [0489] (iii) 2′-F modifications at positions 1, 3, 5, 7, 9 to 11, and 13, and 2′-OMe modifications at positions 2, 4, 6, 8, 12, and 14 to 21; and
   [0490] (iv) phosphorothioate internucleotide linkages between nucleotide positions 1 and 2, and between nucleotide positions 2 and 3 (counting from the 5′ end);
[0491] and
[0492] (b) an antisense strand having:
   [0493] (i) a length of 23 nucleotides;
   [0494] (ii) 2′-OMe modifications at positions 1, 3, 5 to 7, 9, 11 to 13, 15, 17 to 19, and 21 to 23, and 2′-F modifications at positions 2, 4, 8, 10, 14, 16, and 20 (counting from the 5′ end); and
   [0495] (iii) phosphorothioate internucleotide linkages between nucleotide positions 1 and 2, between nucleotide positions 2 and 3, between nucleotide positions 21 and 22, and between nucleotide positions 22 and 23 (counting from the 5′ end);
      wherein the RNAi agents have a two nucleotide overhang at the 3′-end of the antisense strand, and a blunt end at the 5′-end of the antisense strand.

[0496] In another particular embodiment, a RNAi agent of the present invention comprises:
[0497] (a) a sense strand having:
   [0498] (i) a length of 21 nucleotides;
   [0499] (ii) an ASGPR ligand attached to the 3′-end, wherein said ASGPR ligand comprises three GalNAc derivatives attached through a trivalent branched linker;
   [0500] (iii) 2′-OMe modifications at positions 1, 2, 4, 6, 8, 12, 14, 15, 17, and 19 to 21, and 2′-F modifications at positions 3, 5, 7, 9 to 11, 13, 16, and 18; and
   [0501] (iv) phosphorothioate internucleotide linkages between nucleotide positions 1 and 2, and between nucleotide positions 2 and 3 (counting from the 5′ end);
[0502] and
[0503] (b) an antisense strand having:
   [0504] (i) a length of 25 nucleotides;
   [0505] (ii) 2′-OMe modifications at positions 1, 4, 6, 7, 9, 11 to 13, 15, 17, and 19 to 23, 2′-F modifications at positions 2, 3, 5, 8, 10, 14, 16, and 18, and deoxy-nucleotides (e.g. dT) at positions 24 and 25 (counting from the 5′ end); and
   [0506] (iii) phosphorothioate internucleotide linkages between nucleotide positions 1 and 2, between nucleotide positions 2 and 3, between nucleotide positions 21 and 22, and between nucleotide positions 22 and 23 (counting from the 5′ end);
      wherein the RNAi agents have a four nucleotide overhang at the 3′-end of the antisense strand, and a blunt end at the 5′-end of the antisense strand.

[0507] In another particular embodiment, a RNAi agent of the present invention comprises:
[0508] (a) a sense strand having:
   [0509] (i) a length of 21 nucleotides;
   [0510] (ii) an ASGPR ligand attached to the 3′-end, wherein said ASGPR ligand comprises three GalNAc derivatives attached through a trivalent branched linker;
   [0511] (iii) 2′-OMe modifications at positions 1 to 6, 8, and 12 to 21, and 2′-F modifications at positions 7, and 9 to 11; and
   [0512] (iv) phosphorothioate internucleotide linkages between nucleotide positions 1 and 2, and between nucleotide positions 2 and 3 (counting from the 5′ end);
[0513] and
[0514] (b) an antisense strand having:
   [0515] (i) a length of 23 nucleotides;
   [0516] (ii) 2′-OMe modifications at positions 1, 3 to 5, 7, 8, 10 to 13, 15, and 17 to 23, and 2′-F modifications at positions 2, 6, 9, 14, and 16 (counting from the 5′ end); and
   [0517] (iii) phosphorothioate internucleotide linkages between nucleotide positions 1 and 2, between nucleotide positions 2 and 3, between nucleotide positions 21 and 22, and between nucleotide positions 22 and 23 (counting from the 5′ end);
      wherein the RNAi agents have a two nucleotide overhang at the 3′-end of the antisense strand, and a blunt end at the 5′-end of the antisense strand.

[0518] In another particular embodiment, a RNAi agent of the present invention comprises:
[0519] (a) a sense strand having:
   [0520] (i) a length of 21 nucleotides;
   [0521] (ii) an ASGPR ligand attached to the 3′-end, wherein said ASGPR ligand comprises three GalNAc derivatives attached through a trivalent branched linker;
   [0522] (iii) 2′-OMe modifications at positions 1 to 6, 8, and 12 to 21, and 2′-F modifications at positions 7, and 9 to 11; and
   [0523] (iv) phosphorothioate internucleotide linkages between nucleotide positions 1 and 2, and between nucleotide positions 2 and 3 (counting from the 5′ end);
[0524] and
[0525] (b) an antisense strand having:
   [0526] (i) a length of 23 nucleotides;
   [0527] (ii) 2′-OMe modifications at positions 1, 3 to 5, 7, 10 to 13, 15, and 17 to 23, and 2′-F modifications at positions 2, 6, 8, 9, 14, and 16 (counting from the 5′ end); and
   [0528] (iii) phosphorothioate internucleotide linkages between nucleotide positions 1 and 2, between nucleotide positions 2 and 3, between nucleotide positions 21 and 22, and between nucleotide positions 22 and 23 (counting from the 5′ end);
      wherein the RNAi agents have a two nucleotide overhang at the 3′-end of the antisense strand, and a blunt end at the 5′-end of the antisense strand.

[0529] In another particular embodiment, a RNAi agent of the present invention comprises:
[0530] (a) a sense strand having:
   [0531] (i) a length of 19 nucleotides;
   [0532] (ii) an ASGPR ligand attached to the 3′-end, wherein said ASGPR ligand comprises three GalNAc derivatives attached through a trivalent branched linker;
   [0533] (iii) 2′-OMe modifications at positions 1 to 4, 6, and 10 to 19, and 2′-F modifications at positions 5, and 7 to 9; and
   [0534] (iv) phosphorothioate internucleotide linkages between nucleotide positions 1 and 2, and between nucleotide positions 2 and 3 (counting from the 5′ end);
[0535] and
[0536] (b) an antisense strand having:
   [0537] (i) a length of 21 nucleotides;
   [0538] (ii) 2′-OMe modifications at positions 1, 3 to 5, 7, 10 to 13, 15, and 17 to 21, and 2′-F modifications at positions 2, 6, 8, 9, 14, and 16 (counting from the 5′ end); and
   [0539] (iii) phosphorothioate internucleotide linkages between nucleotide positions 1 and 2, between nucleotide positions 2 and 3, between nucleotide positions 19 and 20, and between nucleotide positions 20 and 21 (counting from the 5′ end);
      wherein the RNAi agents have a two nucleotide overhang at the 3′-end of the antisense strand, and a blunt end at the 5′-end of the antisense strand.

[0540] In certain embodiments, the iRNA for use in the methods of the invention is an agent selected from agents listed in any one of Tables 2-5. These agents may further comprise a ligand.

### III. iRNAs Conjugated to Ligands

[0541] Another modification of the RNA of an iRNA of the invention involves chemically linking to the iRNA one or more ligands, moieties or conjugates that enhance the activity, cellular distribution, or cellular uptake of the iRNA e.g., into a cell. Such moieties include but are not limited to lipid moieties such as a cholesterol moiety (Letsinger et al., Proc. Natl. Acid. Sci. USA, 1989, 86:6553-6556). In other embodiments, the ligand is cholic acid (Manoharan et al., Biorg. Med. Chem. Let., 1994, 4:1053-1060), a thioether, e.g., beryl-S-tritylthiol (Manoharan et al., Ann. N.Y. Acad. Sci., 1992, 660:306-309; Manoharan et al., Biorg. Med. Chem. Let., 1993, 3:2765-2770), a thiocholesterol (Oberhauser et al., Nucl. Acids Res., 1992, 20:533-538), an aliphatic chain, e.g., dodecandiol or undecyl residues (Saison-Behmoaras et al., EMBO J, 1991, 10:1111-1118; Kabanov et al., FEBS Lett., 1990, 259:327-330; Svinarchuk et al., Biochimie, 1993, 75:49-54), a phospholipid, e.g., di-hexadecyl-rac-glycerol or triethyl-ammonium 1,2-di-O-hexadecyl-rac-glycero-3-phosphonate (Manoharan et al., Tetrahedron Lett., 1995, 36:3651-3654; Shea et al., Nucl. Acids Res., 1990, 18:3777-3783), a polyamine or a polyethylene glycol chain (Manoharan et al., Nucleosides & Nucleotides, 1995, 14:969-973), or adamantane acetic acid (Manoharan et al., Tetrahedron Lett., 1995, 36:3651-3654), a palmityl moiety (Mishra et al., Biochim. Biophys. Acta, 1995, 1264:229-237), or an octadecylamine or hexylamino-carbonyloxycholesterol moiety (Crooke et al., J. Pharmacol. Exp. Ther., 1996, 277:923-937).

[0542] In certain embodiments, a ligand alters the distribution, targeting, or lifetime of an iRNA agent into which it is incorporated. In some embodiments a ligand provides an enhanced affinity for a selected target, e.g., molecule, cell or cell type, compartment, e.g., a cellular or organ compartment, tissue, organ or region of the body, as, e.g., compared to a species absent such a ligand. In some embodiments, ligands do not take part in duplex pairing in a duplexed nucleic acid.

[0543] Ligands can include a naturally occurring substance, such as a protein (e.g., human serum albumin (HSA), low-density lipoprotein (LDL), or globulin); carbohydrate (e.g., a dextran, pullulan, chitin, chitosan, inulin, cyclodextrin, N-acetylglucosamine, N-acetylgalactosamine, or hyaluronic acid); or a lipid. The ligand can also be a recombinant or synthetic molecule, such as a synthetic polymer, e.g., a synthetic polyamino acid. Examples of polyamino acids include polyamino acid is a polylysine (PLL), poly L-aspartic acid, poly L-glutamic acid, styrene-maleic acid anhydride copolymer, poly(L-lactide-co-glycolied) copolymer, divinyl ether-maleic anhydride copolymer, N-(2-hydroxypropyl) methacrylamide copolymer (HMPA), polyethylene glycol (PEG), polyvinyl alcohol (PVA), polyurethane, poly(2-ethylacryllic acid), N-isopropylacrylamide polymers, or polyphosphazine. Example of polyamines include: polyethylenimine, polylysine (PLL), spermine, spermidine, polyamine, pseudopeptide-polyamine, peptidomimetic polyamine, dendrimer polyamine, arginine, amidine, protamine, cationic lipid, cationic porphyrin, quaternary salt of a polyamine, or an alpha helical peptide.

[0544] Ligands can also include targeting groups, e.g., a cell or tissue targeting agent, e.g., a lectin, glycoprotein, lipid or protein, e.g., an antibody, that binds to a specified cell type such as a kidney cell. A targeting group can be a thyrotropin, melanotropin, lectin, glycoprotein, surfactant protein A, Mucin carbohydrate, multivalent lactose, multivalent galactose, N-acetyl-galactosamine, N-acetyl-glucosamine multivalent mannose, multivalent fucose, glycosylated polyaminoacids, multivalent galactose, transferrin, bisphosphonate, polyglutamate, polyaspartate, a lipid, cholesterol, a steroid, bile acid, folate, vitamin B12, vitamin A, biotin, or an RGD peptide or RGD peptide mimetic. In certain embodiments, the ligand is a multivalent galactose, e.g., an N-acetyl-galactosamine.

[0545] Other examples of ligands include dyes, intercalating agents (e.g. acridines), cross-linkers (e.g. psoralene, mitomycin C), porphyrins (TPPC4, texaphyrin, Sapphyrin), polycyclic aromatic hydrocarbons (e.g., phenazine, dihydrophenazine), artificial endonucleases (e.g. EDTA), lipophilic molecules, e.g., cholesterol, cholic acid, adamantane acetic acid, 1-pyrene butyric acid, dihydrotestosterone. 1,3-Bis-O (hexadecyl)glycerol, geranyloxyhexyl group, hexadecylglycerol, borncol, menthol, 1,3-propanediol, heptadecyl group, palmitic acid, myristic acid, 03-(olcoyl) lithocholic acid, O3-(oleoyl) cholenic acid, dimethoxytrityl, or phenoxazine) and peptide conjugates (e.g., antennapedia peptide, Tat peptide), alkylating agents, phosphate, amino, mercapto, PEG (e.g., PEG-40K), MPEG, [MPEG]₂, polyamino, alkyl, substituted alkyl, radiolabeled markers, enzymes, haptens (e.g. biotin), transport/absorption facilitators (e.g., aspirin, vitamin E, folic acid), synthetic ribonucleases (e.g., imidazole, bisimidazole, histamine, imidazole clusters, acridine-imidazole conjugates, Eu3+ complexes of tetraazamacrocycles), dinitrophenyl, HRP, or AP.

[0546] Ligands can be proteins, e.g., glycoproteins, or peptides, e.g., molecules having a specific affinity for a co-ligand, or antibodies e.g., an antibody, that binds to a specified cell type such as a hepatic cell. Ligands can also include hormones and hormone receptors. They can also include non-peptidic species, such as lipids, lectins, carbohydrates, vitamins, cofactors, multivalent lactose, multivalent galactose, N-acetyl-galactosamine, N-acetyl-glucosamine multivalent mannose, or multivalent fucose. The ligand can be, for example, a lipopolysaccharide, an activator of p38 MAP kinase, or an activator of NF-κB.

[0547] The ligand can be a substance, e.g., a drug, which can increase the uptake of the iRNA agent into the cell, for example, by disrupting the cell's cytoskeleton, e.g., by disrupting the cell's microtubules, microfilaments, or intermediate filaments. The drug can be, for example, taxol, vincristine, vinblastine, cytochalasin, nocodazole, japlakinolide, latrunculin A, phalloidin, swinholide A, indanocine, or myoservin.

[0548] In some embodiments, a ligand attached to an iRNA as described herein acts as a pharmacokinetic modulator (PK modulator). PK modulators include lipophiles, bile acids, steroids, phospholipid analogues, peptides, protein binding agents, PEG, vitamins, etc. Exemplary PK modulators include, but are not limited to, cholesterol, fatty acids, cholic acid, lithocholic acid, dialkylglycerides, diacylglyceride, phospholipids, sphingolipids, naproxen, ibuprofen, vitamin E, biotin. Oligonucleotides that comprise a number of phosphorothioate linkages are also known to bind to serum protein, thus short oligonucleotides, e.g., oligonucleotides of about 5 bases, 10 bases, 15 bases, or 20 bases, comprising multiple of phosphorothioate linkages in the backbone are also amenable to the present invention as ligands (e.g. as PK modulating ligands). In addition, aptamers that bind serum components (e.g. serum proteins) are also suitable for use as PK modulating ligands in the embodiments described herein.

[0549] Ligand-conjugated iRNAs of the invention may be synthesized by the use of an oligonucleotide that bears a pendant reactive functionality, such as that derived from the attachment of a linking molecule onto the oligonucleotide (described below). This reactive oligonucleotide may be reacted directly with commercially-available ligands, ligands that are synthesized bearing any of a variety of protecting groups, or ligands that have a linking moiety attached thereto.

[0550] The oligonucleotides used in the conjugates of the present invention may be conveniently and routinely made through the well-known technique of solid-phase synthesis. Equipment for such synthesis is sold by several vendors including, for example, Applied Biosystems® (Foster City, Calif.). Any other methods for such synthesis known in the art may additionally or alternatively be employed. It is also known to use similar techniques to prepare other oligonucleotides, such as the phosphorothioates and alkylated derivatives.

[0551] In the ligand-conjugated iRNAs and ligand-molecule bearing sequence-specific linked nucleosides of the present invention, the oligonucleotides and oligonucleosides may be assembled on a suitable DNA synthesizer utilizing standard nucleotide or nucleoside precursors, or nucleotide or nucleoside conjugate precursors that already bear the linking moiety, ligand-nucleotide or nucleoside-conjugate precursors that already bear the ligand molecule, or non-nucleoside ligand-bearing building blocks.

[0552] When using nucleotide-conjugate precursors that already bear a linking moiety, the synthesis of the sequence-specific linked nucleosides is typically completed, and the ligand molecule is then reacted with the linking moiety to form the ligand-conjugated oligonucleotide. In some embodiments.

[0553] the oligonucleotides or linked nucleosides of the present invention are synthesized by an automated synthesizer using phosphoramidites derived from ligand-nucleoside conjugates in addition to the standard phosphoramidites and non-standard phosphoramidites that are commercially available and routinely used in oligonucleotide synthesis.

### A. Lipid Conjugates

[0554] In certain embodiments, the ligand or conjugate is a lipid or lipid-based molecule. In one embodiment, such a lipid or lipid-based molecule binds a serum protein, e.g., human serum albumin (HSA). An HSA binding ligand allows for distribution of the conjugate to a target tissue, e.g., a non-kidney target tissue of the body. For example, the target tissue can be the liver, including parenchymal cells of the liver. Other molecules that can bind HSA can also be used as ligands. For example, naproxen or aspirin can be used. A lipid or lipid-based ligand can (a) increase resistance to degradation of the conjugate, (b) increase targeting or transport into a target cell or cell membrane, or (c) can be used to adjust binding to a serum protein, e.g., HSA.

[0555] A lipid based ligand can be used to inhibit, e.g., control the binding of the conjugate to a target tissue. For example, a lipid or lipid-based ligand that binds to HSA more strongly will be less likely to be targeted to the kidney and therefore less likely to be cleared from the body. A lipid or lipid-based ligand that binds to HSA less strongly can be used to target the conjugate to the kidney.

[0556] In certain embodiments, the lipid based ligand binds HSA. In one embodiment, it binds HSA with a sufficient affinity such that the conjugate will be distributed to a non-kidney tissue. However, it is preferred that the affinity not be so strong that the HSA-ligand binding cannot be reversed.

[0557] In other embodiments, the lipid based ligand binds HSA weakly or not at all. In one embodiment, the conjugate will be distributed to the kidney. Other moieties that target to kidney cells can also be used in place of, or in addition to, the lipid based ligand.

[0558] In another aspect, the ligand is a moiety, e.g., a vitamin, which is taken up by a target cell. e.g., a proliferating cell. These are particularly useful for treating disorders characterized by unwanted cell proliferation, e.g., of the malignant or non-malignant type, e.g., cancer cells. Exemplary vitamins include vitamin A, E, and K. Other exemplary vitamins include are B vitamin, e.g., folic acid, B12, riboflavin, biotin, pyridoxal or other vitamins or nutrients taken up by target cells such as liver cells. Also included are HSA and low density lipoprotein (LDL).

### B. Cell Permeation Agents

[0559] In another aspect, the ligand is a cell-permeation agent, such as, a helical cell-permeation agent. In one embodiment, the agent is amphipathic. An exemplary agent is a peptide such as tat or antennopedia. If the agent is a peptide, it can be modified, including a peptidylmimetic, invertomers, non-peptide or pseudo-peptide linkages, and use of D-amino acids. In one embodiment, the helical agent is an alpha-helical agent, which has a lipophilic and a lipophobic phase.

[0560] The ligand can be a peptide or peptidomimetic. A peptidomimetic (also referred to herein as an oligopeptidomimetic) is a molecule capable of folding into a defined three-dimensional structure similar to a natural peptide. The attachment of peptide and peptidomimetics to iRNA agents can affect pharmacokinetic distribution of the iRNA, such as by enhancing cellular recognition and absorption. The peptide or peptidomimetic moiety can be about 5-50 amino acids long, e.g., about 5, 10, 15, 20, 25, 30, 35, 40, 45, or 50 amino acids long.

[0561] A peptide or peptidomimetic can be, for example, a cell permeation peptide, cationic peptide, amphipathic peptide, or hydrophobic peptide (e.g., consisting primarily of Tyr, Trp, or Phe). The peptide moiety can be a dendrimer peptide, constrained peptide or crosslinked peptide. In another alternative, the peptide moiety can include a hydrophobic membrane translocation sequence (MTS). An exemplary hydrophobic MTS-containing peptide is RFGF having the amino acid sequence AAVALLPAVLLALLAP (SEQ ID NO: 909). An RFGF analogue (e.g., amino acid sequence AALLPVLLAAP (SEQ ID NO:910) containing a hydrophobic MTS can also be a targeting moiety. The peptide moiety can be a “delivery” peptide, which can carry large polar molecules including peptides, oligonucleotides, and protein across cell membranes. For example, sequences from the HIV Tat protein (GRKKRRQRRRPPQ (SEQ ID NO:911) and the Drosophila Antennapedia protein (RQIKIWFQNRRMKWKK (SEQ ID NO:912) have been found to be capable of functioning as delivery peptides. A peptide or peptidomimetic can be encoded by a random sequence of DNA, such as a peptide identified from a phage-display library, or one-bead-one-compound (OBOC) combinatorial library (Lam et al., Nature, 354:82-84, 1991). Examples of a peptide or peptidomimetic tethered to a dsRNA agent via an incorporated monomer unit for cell targeting purposes is an arginine-glycine-aspartic acid (RGD)-peptide, or RGD mimic. A peptide moiety can range in length from about 5 amino acids to about 40 amino acids. The peptide moieties can have a structural modification, such as to increase stability or direct conformational properties. Any of the structural modifications described below can be utilized.

[0562] An RGD peptide for use in the compositions and methods of the invention may be linear or cyclic, and may be modified, e.g., glycosylated or methylated, to facilitate targeting to a specific tissue(s). RGD-containing peptides and peptidiomimemtics may include D-amino acids, as well as synthetic RGD mimics. In addition to RGD, one can use other moieties that target the integrin ligand, e.g., PECAM-1 or VEGF.

[0563] A “cell permeation peptide” is capable of permeating a cell, e.g., a microbial cell, such as a bacterial or fungal cell, or a mammalian cell, such as a human cell. A microbial cell-permeating peptide can be, for example, an α-helical linear peptide (e.g., LL-37 or Ceropin P1), a disulfide bond-containing peptide (e.g., α-defensin, β-defensin or bactenecin), or a peptide containing only one or two dominating amino acids (e.g., PR-39 or indolicidin). A cell permeation peptide can also include a nuclear localization signal (NLS). For example, a cell permeation peptide can be a bipartite amphipathic peptide, such as MPG, which is derived from the fusion peptide domain of HIV-1 gp41 and the NLS of SV40 large T antigen (Simeoni et al., Nucl. Acids Res. 31:2717-2724, 2003).

### C. Carbohydrate Conjugates

[0564] In some embodiments of the compositions and methods of the invention, an iRNA further comprises a carbohydrate. The carbohydrate conjugated iRNA is advantageous for the in vivo delivery of nucleic acids, as well as compositions suitable for in vivo therapeutic use, as described herein. As used herein, “carbohydrate” refers to a compound which is either a carbohydrate per se made up of one or more monosaccharide units having at least 6 carbon atoms (which can be linear, branched or cyclic) with an oxygen, nitrogen or sulfur atom bonded to each carbon atom; or a compound having as a part thereof a carbohydrate moiety made up of one or more monosaccharide units each having at least six carbon atoms (which can be linear, branched or cyclic), with an oxygen, nitrogen or sulfur atom bonded to each carbon atom. Representative carbohydrates include the sugars (mono-, di-, tri-, and oligosaccharides containing from about 4, 5, 6, 7, 8, or 9 monosaccharide units), and polysaccharides such as starches, glycogen, cellulose and polysaccharide gums. Specific monosaccharides include C5 and above (e.g., C5, C6, C7, or C8) sugars; di- and trisaccharides include sugars having two or three monosaccharide units (e.g., C5, C6, C7, or C8).

[0565] In certain embodiments, a carbohydrate conjugate for use in the compositions and methods of the invention is a monosaccharide.

[0566] In certain embodiments, the monosaccharide is an N-acetylgalactosamine (GalNAc). GalNAc conjugates, which comprise one or more N-acetylgalactosamine (GalNAc) derivatives, are described, for example, in U.S. Pat. No. 8,106,022, the entire content of which is hereby incorporated herein by reference. In some embodiments, the GalNAc conjugate serves as a ligand that targets the iRNA to particular cells. In some embodiments, the GalNAc conjugate targets the iRNA to liver cells, e.g., by serving as a ligand for the asialoglycoprotein receptor of liver cells (e.g., hepatocytes).

[0567] In some embodiments, the carbohydrate conjugate comprises one or more GalNAc derivatives. The GalNAc derivatives may be attached via a linker, e.g., a bivalent or trivalent branched linker. In some embodiments the GalNAc conjugate is conjugated to the 3′ end of the sense strand. In some embodiments, the GalNAc conjugate is conjugated to the iRNA agent (e.g., to the 3′ end of the sense strand) via a linker, e.g., a linker as described herein. In some embodiments the GalNAc conjugate is conjugated to the 5′ end of the sense strand. In some embodiments, the GalNAc conjugate is conjugated to the iRNA agent (e.g., to the 5′ end of the sense strand) via a linker, e.g., a linker as described herein.

[0568] In certain embodiments of the invention, the GalNAc or GalNAc derivative is attached to an iRNA agent of the invention via a monovalent linker. In some embodiments, the GalNAc or GalNAc derivative is attached to an iRNA agent of the invention via a bivalent linker. In yet other embodiments of the invention, the GalNAc or GalNAc derivative is attached to an iRNA agent of the invention via a trivalent linker. In other embodiments of the invention, the GalNAc or GalNAc derivative is attached to an iRNA agent of the invention via a tetravalent linker.

[0569] In certain embodiments, the double stranded RNAi agents of the invention comprise one GalNAc or GalNAc derivative attached to the iRNA agent. In certain embodiments, the double stranded RNAi agents of the invention comprise a plurality (e.g., 2, 3, 4, 5, or 6) GalNAc or GalNAc derivatives, each independently attached to a plurality of nucleotides of the double stranded RNAi agent through a plurality of monovalent linkers.

[0570] In some embodiments, for example, when the two strands of an iRNA agent of the invention are part of one larger molecule connected by an uninterrupted chain of nucleotides between the 3′-end of one strand and the 5′-end of the respective other strand forming a hairpin loop comprising, a plurality of unpaired nucleotides, each unpaired nucleotide within the hairpin loop may independently comprise a GalNAc or GalNAc derivative attached via a monovalent linker. The hairpin loop may also be formed by an extended overhang in one strand of the duplex.

[0571] In some embodiments, for example, when the two strands of an iRNA agent of the invention are part of one larger molecule connected by an uninterrupted chain of nucleotides between the 3′-end of one strand and the 5′-end of the respective other strand forming a hairpin loop comprising, a plurality of unpaired nucleotides, each unpaired nucleotide within the hairpin loop may independently comprise a GalNAc or GalNAc derivative attached via a monovalent linker. The hairpin loop may also be formed by an extended overhang in one strand of the duplex.

[0572] In one embodiment, a carbohydrate conjugate for use in the compositions and methods of the invention is selected from the group consisting of:

[chemical structure]

[chemical structure]

[chemical structure]

[chemical structure]

[chemical structure]

wherein Y is O or S and n is 3-6 (Formula XXIV);

[chemical structure]

wherein Y is O or S and n is 3-6 (Formula XXV);

[chemical structure]

wherein X is O or S (Formula XXVII);

[chemical structure]

[chemical structure]

[chemical structure]

[0573] In another embodiment, a carbohydrate conjugate for use in the compositions and methods of the invention is a monosaccharide. In one embodiment, the monosaccharide is an N-acetylgalactosamine, such as

[chemical structure]

[0574] In some embodiments, the RNAi agent is attached to the carbohydrate conjugate via a linker as shown in the following schematic, wherein X is O or S.

[chemical structure]

[0575] In some embodiments, the RNAi agent is conjugated to L96 as defined in Table 1 and shown below:

[chemical structure]

[0576] Another representative carbohydrate conjugate for use in the embodiments described herein includes, but is not limited to,

[chemical structure]

(Formula XXXVI), when one of X or Y is an oligonucleotide, the other is a hydrogen.

[0577] In some embodiments, a suitable ligand is a ligand disclosed in WO 2019/055633, the entire contents of which are incorporated herein by reference. In one embodiment the ligand comprises the structure below:

[chemical structure]

[0578] In certain embodiments of the invention, the GalNAc or GalNAc derivative is attached to an iRNA agent of the invention via a monovalent linker. In some embodiments, the GalNAc or GalNAc derivative is attached to an iRNA agent of the invention via a bivalent linker. In yet other embodiments of the invention, the GalNAc or GalNAc derivative is attached to an iRNA agent of the invention via a trivalent linker.

[0579] In one embodiment, the double stranded RNAi agents of the invention comprise one or more GalNAc or GalNAc derivative attached to the iRNA agent. The GalNAc may be attached to any nucleotide via a linker on the sense strand or antsisense strand. The GalNac may be attached to the 5′-end of the sense strand, the 3′ end of the sense strand, the 5′-end of the antisense strand, or the 3′-end of the antisense strand. In one embodiment, the GalNAc is attached to the 3′ end of the sense strand, e.g., via a trivalent linker.

[0580] In other embodiments, the double stranded RNAi agents of the invention comprise a plurality (e.g., 2, 3, 4, 5, or 6) GalNAc or GalNAc derivatives, each independently attached to a plurality of nucleotides of the double stranded RNAi agent through a plurality of linkers, e.g., monovalent linkers.

[0581] In some embodiments, for example, when the two strands of an iRNA agent of the invention is part of one larger molecule connected by an uninterrupted chain of nucleotides between the 3′-end of one strand and the 5′-end of the respective other strand forming a hairpin loop comprising, a plurality of unpaired nucleotides, each unpaired nucleotide within the hairpin loop may independently comprise a GalNAc or GalNAc derivative attached via a monovalent linker.

[0582] In some embodiments, the carbohydrate conjugate further comprises one or more additional ligands as described above, such as, but not limited to, a PK modulator or a cell permeation peptide.

[0583] Additional carbohydrate conjugates and linkers suitable for use in the present invention include those described in PCT Publication Nos. WO 2014/179620 and WO 2014/179627, the entire contents of each of which are incorporated herein by reference.

### D. Linkers

[0584] In some embodiments, the conjugate or ligand described herein can be attached to an iRNA oligonucleotide with various linkers that can be cleavable or non-cleavable.

[0585] The term “linker” or “linking group” means an organic moiety that connects two parts of a compound, e.g., covalently attaches two parts of a compound. Linkers typically comprise a direct bond or an atom such as oxygen or sulfur, a unit such as NR8, C(O), C(O)NH, SO, SO₂, SO₂NH or a chain of atoms, such as, but not limited to, substituted or unsubstituted alkyl, substituted or unsubstituted alkenyl, substituted or unsubstituted alkynyl, arylalkyl, arylalkenyl, arylalkynyl, heteroarylalkyl, heteroarylalkenyl, heteroarylalkynyl, heterocyclylalkyl, heterocyclylalkenyl, heterocyclylalkynyl, aryl, heteroaryl, heterocyclyl, cycloalkyl, cycloalkenyl, alkylarylalkyl, alkylarylalkenyl, alkylarylalkynyl, alkenylarylalkyl, alkenylarylalkenyl, alkenylarylalkynyl, alkynylarylalkyl, alkynylarylalkenyl, alkynylarylalkynyl, alkylheteroarylalkyl, alkylheteroarylalkenyl, alkylheteroarylalkynyl, alkenylheteroarylalkyl, alkenylheteroarylalkenyl, alkenylheteroarylalkynyl, alkynylheteroarylalkyl, alkynylheteroarylalkenyl, alkynylheteroarylalkynyl, alkylheterocyclylalkyl, alkylheterocyclylalkenyl, alkylhererocyclylalkynyl, alkenylheterocyclylalkyl, alkenylheterocyclylalkenyl, alkenylheterocyclylalkynyl, alkynylheterocyclylalkyl, alkynylheterocyclylalkenyl, alkynylheterocyclylalkynyl, alkylaryl, alkenylaryl, alkynylaryl, alkylheteroaryl, alkenylheteroaryl, alkynylhereroaryl, which one or more methylenes can be interrupted or terminated by O, S, S(O), SO₂, N(R8), C(O), substituted or unsubstituted aryl, substituted or unsubstituted heteroaryl, or substituted or unsubstituted heterocyclic; where R8 is hydrogen, acyl, aliphatic, or substituted aliphatic. In one embodiment, the linker is about 1-24 atoms, 2-24, 3-24, 4-24, 5-24, 6-24, 6-18, 7-18, 8-18, 7-17, 8-17, 6-16, 7-17, or 8-16 atoms.

[0586] A cleavable linking group is one which is sufficiently stable outside the cell, but which upon entry into a target cell is cleaved to release the two parts the linker is holding together. In an exemplary embodiment, the cleavable linking group is cleaved at least about 10 times, 20, times, 30 times, 40 times, 50 times, 60 times, 70 times, 80 times, 90 times, or more, or at least 100 times faster in a target cell or under a first reference condition (which can, e.g., be selected to mimic or represent intracellular conditions) than in the blood of a subject, or under a second reference condition (which can, e.g., be selected to mimic or represent conditions found in the blood or serum).

[0587] Cleavable linking groups are susceptible to cleavage agents, e.g., pH, redox potential, or the presence of degradative molecules. Generally, cleavage agents are more prevalent or found at higher levels or activities inside cells than in serum or blood. Examples of such degradative agents include: redox agents which are selected for particular substrates or which have no substrate specificity, including, e.g., oxidative or reductive enzymes or reductive agents such as mercaptans, present in cells, that can degrade a redox cleavable linking group by reduction; esterases; endosomes or agents that can create an acidic environment, e.g., those that result in a pH of five or lower; enzymes that can hydrolyze or degrade an acid cleavable linking group by acting as a general acid, peptidases (which can be substrate specific), and phosphatases.

[0588] A cleavable linkage group, such as a disulfide bond can be susceptible to pH. The pH of human serum is 7.4, while the average intracellular pH is slightly lower, ranging from about 7.1-7.3. Endosomes have a more acidic pH, in the range of 5.5-6.0, and lysosomes have an even more acidic pH at around 5.0. Some linkers will have a cleavable linking group that is cleaved at a selected pH, thereby releasing a cationic lipid from the ligand inside the cell, or into the desired compartment of the cell.

[0589] A linker can include a cleavable linking group that is cleavable by a particular enzyme. The type of cleavable linking group incorporated into a linker can depend on the cell to be targeted. For example, a liver-targeting ligand can be linked to a cationic lipid through a linker that includes an ester group. Liver cells are rich in esterases, and therefore the linker will be cleaved more efficiently in liver cells than in cell types that are not esterase-rich. Other cell-types rich in esterases include cells of the lung, renal cortex, and testis.

[0590] Linkers that contain peptide bonds can be used when targeting cell types rich in peptidases, such as liver cells and synoviocytes.

[0591] In general, the suitability of a candidate cleavable linking group can be evaluated by testing the ability of a degradative agent (or condition) to cleave the candidate linking group. It will also be desirable to also test the candidate cleavable linking group for the ability to resist cleavage in the blood or when in contact with other non-target tissue. Thus, one can determine the relative susceptibility to cleavage between a first and a second condition, where the first is selected to be indicative of cleavage in a target cell and the second is selected to be indicative of cleavage in other tissues or biological fluids, e.g., blood or serum. The evaluations can be carried out in cell free systems, in cells, in cell culture, in organ or tissue culture, or in whole animals. It can be useful to make initial evaluations in cell-free or culture conditions and to confirm by further evaluations in whole animals. In certain embodiments, useful candidate compounds are cleaved at least about 2, 4, 10, 20, 30, 40, 50, 60, 70, 80, 90, or 100 times faster in the cell (or under in vitro conditions selected to mimic intracellular conditions) as compared to blood or serum (or under in vitro conditions selected to mimic extracellular conditions).

i. Redox Cleavable Linking Groups

[0592] In certain embodiments, a cleavable linking group is a redox cleavable linking group that is cleaved upon reduction or oxidation. An example of reductively cleavable linking group is a disulphide linking group (—S—S—). To determine if a candidate cleavable linking group is a suitable “reductively cleavable linking group.” or for example is suitable for use with a particular iRNA moiety and particular targeting agent one can look to methods described herein. For example, a candidate can be evaluated by incubation with dithiothreitol (DTT), or other reducing agent using reagents know in the art, which mimic the rate of cleavage which would be observed in a cell, e.g., a target cell. The candidates can also be evaluated under conditions which are selected to mimic blood or serum conditions. In one, candidate compounds are cleaved by at most about 10% in the blood. In other embodiments, useful candidate compounds are degraded at least about 2, 4, 10, 20, 30, 40, 50, 60, 70, 80, 90, or about 100 times faster in the cell (or under in vitro conditions selected to mimic intracellular conditions) as compared to blood (or under in vitro conditions selected to mimic extracellular conditions). The rate of cleavage of candidate compounds can be determined using standard enzyme kinetics assays under conditions chosen to mimic intracellular media and compared to conditions chosen to mimic extracellular media.

ii. Phosphate-Based Cleavable Linking Groups

[0593] In other embodiments, a cleavable linker comprises a phosphate-based cleavable linking group. A phosphate-based cleavable linking group is cleaved by agents that degrade or hydrolyze the phosphate group. An example of an agent that cleaves phosphate groups in cells are enzymes such as phosphatases in cells. Examples of phosphate-based linking groups are —O—P(O)(ORk)-O—, —O—P(S)(ORk)-O—, —O—P(S)(SRk)-O—, —S—P(O)(ORk)-O—, —O—P(O)(ORk)-S—, —S—P(O)(ORk)-S—, —O—P(S)(ORk)-S—, —S—P(S)(ORk)-O—, —O—P(O)(Rk)-O—, —O—P(S)(Rk)-O—, —S—P(O)(Rk)-O—, —S—P(S)(Rk)-O—, —S—P(O)(Rk)-S—, —O—P(S)(Rk)-S—, wherein Rk at each occurrence can be, independently, C1-C20 alkyl, C1-C20 haloalkyl, C6-C10 aryl, or C7-C12 aralkyl. Exemplary embodiments include —O—P(O)(OH)—O—, —O—P(S)(OH)—O—, —O—P(S)(SH)—O—, —S—P(O)(OH)—O—, —O—P(O)(OH)—S—, —S—P(O)(OH)—S—, —O—P(S)(OH)—S—, —S—P(S)(OH)—O—, —O—P(O)(H)—O—, —O—P(S)(H)—O—, —S—P(O)(H)—O, —S—P(S)(H)—O—, —S—P(O)(H)—S—, and —O—P(S)(H)—S—. In certain embodiments a phosphate-based linking group is —O—P(O)(OH)—O—. These candidates can be evaluated using methods analogous to those described above.

iii. Acid Cleavable Linking Groups

[0594] In other embodiments, a cleavable linker comprises an acid cleavable linking group. An acid cleavable linking group is a linking group that is cleaved under acidic conditions. In certain embodiments acid cleavable linking groups are cleaved in an acidic environment with a pH of about 6.5 or lower (e.g., about 6.0, 5.5, 5.0, or lower), or by agents such as enzymes that can act as a general acid. In a cell, specific low pH organelles, such as endosomes and lysosomes can provide a cleaving environment for acid cleavable linking groups. Examples of acid cleavable linking groups include but are not limited to hydrazones, esters, and esters of amino acids. Acid cleavable groups can have the general formula —C═NN—, C(O)O, or —OC(O). An exemplary embodiment is when the carbon attached to the oxygen of the ester (the alkoxy group) is an aryl group, substituted alkyl group, or tertiary alkyl group such as dimethyl pentyl or t-butyl. These candidates can be evaluated using methods analogous to those described above.

iv. Ester-Based Linking Groups

[0595] In other embodiments, a cleavable linker comprises an ester-based cleavable linking group. An ester-based cleavable linking group is cleaved by enzymes such as esterases and amidases in cells. Examples of ester-based cleavable linking groups include, but are not limited to, esters of alkylene, alkenylene and alkynylene groups. Ester cleavable linking groups have the general formula —C(O)O—, or —OC(O)—. These candidates can be evaluated using methods analogous to those described above.

v. Peptide-Based Cleaving Groups

[0596] In yet other embodiments, a cleavable linker comprises a peptide-based cleavable linking group. A peptide-based cleavable linking group is cleaved by enzymes such as peptidases and proteases in cells. Peptide-based cleavable linking groups are peptide bonds formed between amino acids to yield oligopeptides (e.g., dipeptides, tripeptides etc.) and polypeptides. Peptide-based cleavable groups do not include the amide group (—C(O)NH—). The amide group can be formed between any alkylene, alkenylene or alkynelene. A peptide bond is a special type of amide bond formed between amino acids to yield peptides and proteins. The peptide based cleavage group is generally limited to the peptide bond (i.e., the amide bond) formed between amino acids yielding peptides and proteins and does not include the entire amide functional group. Peptide-based cleavable linking groups have the general formula -NHCHRAC(O)NHCHRBC(O)—, where RA and RB are the R groups of the two adjacent amino acids. These candidates can be evaluated using methods analogous to those described above.

[0597] In some embodiments, an iRNA of the invention is conjugated to a carbohydrate through a linker. Non-limiting examples of iRNA carbohydrate conjugates with linkers of the compositions and methods of the invention include, but are not limited to,

[chemical structure]

[chemical structure]

[chemical structure]

when one of X or Y is an oligonucleotide, the other is a hydrogen.

[0598] In certain embodiments of the compositions and methods of the invention, a ligand is one or more “GalNAc” (N-acetylgalactosamine) derivatives attached through a bivalent or trivalent branched linker.

[0599] In one embodiment, a dsRNA of the invention is conjugated to a bivalent or trivalent branched linker selected from the group of structures shown in any of formula (XLV)-(XLVIII):

[chemical structure]

[0600] wherein:
[0601] q^{2A}, q^{2B}, q^{3A}, q^{3B}, q^{4A}, q^{4B}, q^{5A}, q^{5B} and q^{5C} represent independently for each occurrence 0-20 and wherein the repeating unit can be the same or different;
[0602] P^{2A}, P^{2B}, P^{3A}, P^{3B}, P^{4A}, P^{4B}, P^{5A}, P^{5B}, P^{5C}, T^{2A}, T^{2B}, T^{3A}, T^{3B}, T^{4A}, T^{4B}, T^{4A}, T^{5B}, T^{5C} are each independently for each occurrence absent, CO, NH, O, S, OC(O), NHC(O), CH₂, CH₂NH or CH₂O;
[0603] Q^{2A}, Q^{2B}, Q^{3A}, Q^{3B}, Q^{4A}, Q^{4B}, Q^{5A}, Q^{5B}, QC are independently for each occurrence absent, alkylene, substituted alkylene wherein one or more methylenes can be interrupted or terminated by one or more of O, S, S(O), SO₂, N(RN), C(R′)═C(R″), C═C or C(O);
[0604] R^{2A}, R^{2B}, R^{3A}, R^{3B}, R^{4A}, R^{4B}, R^{5A}, R^{5B}, R^{5C} are each independently for each occurrence absent, NH, O, S, CH₂, C(O)O, C(O)NH, NHCH(R^{a})C(O), —C(O)—CH(R^{a})—NH—, CO, CH═N—O,

[chemical structure]

or heterocyclyl;
[0605] L^{2A}, L^{2B}, L^{3A}, L^{3B}, L^{4A}, L^{4B}, L^{5A}, L^{5B} and L^{5C} represent the ligand; i.e. each independently for each occurrence a monosaccharide (such as GalNAc), disaccharide, trisaccharide, tetrasaccharide, oligosaccharide, or polysaccharide; and R^{a} is H or amino acid side chain. Trivalent conjugating GalNAc derivatives are particularly useful for use with RNAi agents for inhibiting the expression of a target gene, such as those of formula (XLIX):

[chemical structure]

wherein L^{5A}, L^{5B} and L^{5C} represent a monosacenanue, such as GalNAc derivative.

[0606] Examples of suitable bivalent and trivalent branched linker groups conjugating GalNAc derivatives include, but are not limited to, the structures recited above as formulas II, VII, XI, X, and XIII.

[0607] Representative U.S. Patents that teach the preparation of RNA conjugates include, but are not limited to, U.S. Pat. Nos. 4,828,979; 4,948,882; 5,218,105; 5,525,465; 5,541,313; 5,545,730; 5,552,538; 5,578,717, 5,580,731; 5,591,584; 5,109,124; 5,118,802; 5,138,045; 5,414,077; 5,486,603; 5,512,439; 5,578,718; 5,608,046; 4,587,044; 4,605,735; 4,667,025; 4,762,779; 4,789,737; 4,824,941; 4,835,263; 4,876,335; 4,904,582; 4,958,013; 5,082,830; 5,112,963; 5,214,136; 5,082,830; 5,112,963; 5,214,136; 5,245,022; 5,254,469; 5,258,506; 5,262,536; 5,272,250; 5,292,873; 5,317,098; 5,371,241, 5,391,723; 5,416,203, 5,451,463; 5,510,475; 5,512,667; 5,514,785; 5,565,552; 5,567,810; 5,574,142; 5,585,481; 5,587,371; 5,595,726; 5,597,696; 5,599,923; 5,599,928; 5,688,941; 6,294,664; 6,320,017; 6,576,752; 6,783,931; 6,900,297; 7,037,646; and 8,106,022, the entire contents of each of which are hereby incorporated herein by reference.

[0608] It is not necessary for all positions in a given compound to be uniformly modified, and in fact more than one of the aforementioned modifications can be incorporated in a single compound or even at a single nucleoside within an iRNA. The present invention also includes iRNA compounds that are chimeric compounds.

[0609] “Chimeric” iRNA compounds or “chimeras,” in the context of this invention, are iRNA compounds, such as, dsRNAi agents, that contain two or more chemically distinct regions, each made up of at least one monomer unit, i.e., a nucleotide in the case of a dsRNA compound. These iRNAs typically contain at least one region wherein the RNA is modified so as to confer upon the iRNA increased resistance to nuclease degradation, increased cellular uptake, or increased binding affinity for the target nucleic acid. An additional region of the iRNA can serve as a substrate for enzymes capable of cleaving RNA:DNA or RNA:RNA hybrids. By way of example, RNase H is a cellular endonuclease which cleaves the RNA strand of an RNA:DNA duplex. Activation of RNase H, therefore, results in cleavage of the RNA target, thereby greatly enhancing the efficiency of iRNA inhibition of gene expression. Consequently, comparable results can often be obtained with shorter iRNAs when chimeric dsRNAs are used, compared to phosphorothioate deoxy dsRNAs hybridizing to the same target region. Cleavage of the RNA target can be routinely detected by gel electrophoresis and, if necessary, associated nucleic acid hybridization techniques known in the art.

[0610] In certain instances, the RNA of an iRNA can be modified by a non-ligand group. A number of non-ligand molecules have been conjugated to iRNAs in order to enhance the activity, cellular distribution or cellular uptake of the iRNA, and procedures for performing such conjugations are available in the scientific literature. Such non-ligand moieties have included lipid moieties, such as cholesterol (Kubo, T. et al., Biochem. Biophys. Res. Comm., 2007, 365 (1): 54-61; Letsinger et al., Proc. Natl. Acad. Sci. USA, 1989, 86:6553), cholic acid (Manoharan et al., Bioorg. Med. Chem. Lett., 1994, 4:1053), a thioether, e.g., hexyl-S-tritylthiol (Manoharan et al., Ann. N.Y. Acad. Sci., 1992, 660:306; Manoharan et al., Bioorg. Med. Chem. Let., 1993, 3:2765), a thiocholesterol (Oberhauser et al., Nucl. Acids Res., 1992, 20:533), an aliphatic chain, e.g., dodecandiol or undecyl residues (Saison-Behmoaras et al., EMBO J., 1991, 10: 111; Kabanov et al., FEBS Lett., 1990, 259: 327; Svinarchuk et al., Biochimie, 1993, 75:49), a phospholipid, e.g., di-hexadecyl-rac-glycerol or triethylammonium 1,2-di-O-hexadecyl-rac-glycero-3-H-phosphonate (Manoharan et al., Tetrahedron Lett., 1995, 36:3651; Shea et al., Nucl. Acids Res., 1990, 18:3777), a polyamine or a polyethylene glycol chain (Manoharan et al., Nucleosides & Nucleotides, 1995, 14:969), or adamantane acetic acid (Manoharan et al., Tetrahedron Lett., 1995, 36:3651), a palmityl moiety (Mishra et al., Biochim. Biophys. Acta, 1995, 1264:229), or an octadecylamine or hexylamino-carbonyl-oxycholesterol moiety (Crooke et al., J. Pharmacol. Exp. Ther., 1996, 277:923). Representative United States patents that teach the preparation of such RNA conjugates have been listed above. Typical conjugation protocols involve the synthesis of RNAs bearing an aminolinker at one or more positions of the sequence. The amino group is then reacted with the molecule being conjugated using appropriate coupling or activating reagents. The conjugation reaction can be performed either with the RNA still bound to the solid support or following cleavage of the RNA, in solution phase. Purification of the RNA conjugate by HPLC typically affords the pure conjugate.

### IV. Delivery of an iRNA of the Invention

[0611] The delivery of an iRNA of the invention to a cell e.g., a cell within a subject, such as a human subject (e.g., a subject in need thereof, such as a subject susceptible to or diagnosed with a C3-associated disorder, e.g., paroxysmal nocturnal hemoglobinuria (PNH), atypical hemolytic uremic syndrome (aHUS), atypical hemolytic uremic syndrome (aHUS), neuromyelitis optica (NMO), multifocal motor neuropathy (MMN), myasthenia gravis (MG), C3 glomerulonephritis, or systemic lupus erythmatosis, can be achieved in a number of different ways. For example, delivery may be performed by contacting a cell with an iRNA of the invention either in vitro or in vivo. In vivo delivery may also be performed directly by administering a composition comprising an iRNA, e.g., a dsRNA, to a subject. Alternatively, in vivo delivery may be performed indirectly by administering one or more vectors that encode and direct the expression of the iRNA. These alternatives are discussed further below.

[0612] In general, any method of delivering a nucleic acid molecule (in vitro or in vivo) can be adapted for use with an iRNA of the invention (see e.g., Akhtar S. and Julian RL. (1992) Trends Cell. Biol. 2 (5): 139-144 and WO94/02595, which are incorporated herein by reference in their entireties). For in vivo delivery, factors to consider in order to deliver an iRNA molecule include, for example, biological stability of the delivered molecule, prevention of non-specific effects, and accumulation of the delivered molecule in the target tissue. RNA interference has also shown success with local delivery to the CNS by direct injection (Dorn, G., et al. (2004) Nucleic Acids 32: e49; Tan, P H., et al (2005) Gene Ther. 12:59-66; Makimura, H., et al (2002) BMC Neurosci. 3:18; Shishkina, G T., et al (2004) Neuroscience 129:521-528; Thakker, E R., et al (2004) Proc. Natl. Acad. Sci. U.S.A. 101:17270-17275; Akancya, Y., et al (2005) J. Neurophysiol. 93:594-602). Modification of the RNA or the pharmaceutical carrier can also permit targeting of the iRNA to the target tissue and avoid undesirable off-target effects. iRNA molecules can be modified by chemical conjugation to lipophilic groups such as cholesterol to enhance cellular uptake and prevent degradation. For example, an iRNA directed against ApoB conjugated to a lipophilic cholesterol moiety was injected systemically into mice and resulted in knockdown of apoB mRNA in both the liver and jejunum (Soutschek, J., et al (2004) Nature 432:173-178).

[0613] In an alternative embodiment, the iRNA can be delivered using drug delivery systems such as a nanoparticle, a dendrimer, a polymer, liposomes, or a cationic delivery system. Positively charged cationic delivery systems facilitate binding of an iRNA molecule (negatively charged) and also enhance interactions at the negatively charged cell membrane to permit efficient uptake of an iRNA by the cell. Cationic lipids, dendrimers, or polymers can either be bound to an iRNA, or induced to form a vesicle or micelle (see e.g., Kim S H, et al (2008) Journal of Controlled Release 129 (2): 107-116) that encases an iRNA. The formation of vesicles or micelles further prevents degradation of the iRNA when administered systemically. Methods for making and administering cationic-iRNA complexes are well within the abilities of one skilled in the art (see e.g., Sorensen, D R, et al (2003) J. Mol. Biol 327:761-766; Verma, U N, et al (2003) Clin. Cancer Res. 9:1291-1300; Arnold, A S et al (2007) J. Hypertens. 25:197-205, which are incorporated herein by reference in their entirety). Some non-limiting examples of drug delivery systems useful for systemic delivery of iRNAs include DOTAP (Sorensen, D R., et al (2003), supra; Verma, U N, et al (2003), supra), “solid nucleic acid lipid particles” (Zimmermann, T S, et al (2006) Nature 441:111-114), cardiolipin (Chien, P Y, et al (2005) Cancer Gene Ther. 12:321-328; Pal, A, et al (2005) Int J. Oncol. 26:1087-1091), polyethyleneimine (Bonnet M E, et al (2008) Pharm. Res. August 16 Epub ahead of print; Aigner, A. (2006) J. Biomed. Biotechnol. 71659), Arg-Gly-Asp (RGD) peptides (Liu, S. (2006) Mol. Pharm. 3:472-487), and polyamidoamines (Tomalia, D A, et al (2007) Biochem. Soc. Trans. 35:61-67; Yoo, H., et al (1999) Pharm. Res. 16:1799-1804). In some embodiments, an iRNA forms a complex with cyclodextrin for systemic administration. Methods for administration and pharmaceutical compositions of iRNAs and cyclodextrins can be found in U.S. Pat. No. 7,427,605, which is herein incorporated by reference in its entirety. Certain aspects of the instant disclosure relate to a method of reducing the expression of a C3 gene in a cell, comprising contacting said cell with the double-stranded RNAi agent of the disclosure. In one embodiment, the cell is a hepatic cell, optionally a hepatocyte. In one embodiment, the cell is an extrahepatic cell.

A. Vector Encoded iRNAs of the Invention

[0614] iRNA targeting the C3 gene can be expressed from transcription units inserted into DNA or RNA vectors (see, e.g., Couture, A, et al., TIG. (1996), 12:5-10; Skillern, A, et al., International PCT Publication No. WO 00/22113, Conrad, International PCT Publication No. WO 00/22114, and

[0615] Conrad, U.S. Pat. No. 6,054,299). Expression can be transient (on the order of hours to weeks) or sustained (weeks to months or longer), depending upon the specific construct used and the target tissue or cell type. These transgenes can be introduced as a linear construct, a circular plasmid, or a viral vector, which can be an integrating or non-integrating vector. The transgene can also be constructed to permit it to be inherited as an extrachromosomal plasmid (Gassmann, et al., Proc. Natl. Acad. Sci. USA (1995) 92:1292).

[0616] Viral vector systems which can be utilized with the methods and compositions described herein include, but are not limited to, (a) adenovirus vectors; (b) retrovirus vectors, including but not limited to lentiviral vectors, moloney murine leukemia virus, etc.; (c) adeno-associated virus vectors; (d) herpes simplex virus vectors; (e) SV 40 vectors; (f) polyoma virus vectors; (g) papilloma virus vectors; (h) picornavirus vectors; (i) pox virus vectors such as an orthopox, e.g., vaccinia virus vectors or avipox, e.g. canary pox or fowl pox; and (j) a helper-dependent or gutless adenovirus. Replication-defective viruses can also be advantageous. Different vectors will or will not become incorporated into the cells' genome. The constructs can include viral sequences for transfection, if desired. Alternatively, the construct can be incorporated into vectors capable of episomal replication, e.g. EPV and EBV vectors. Constructs for the recombinant expression of an iRNA will generally require regulatory elements, e.g., promoters, enhancers, etc., to ensure the expression of the iRNA in target cells. Other aspects to consider for vectors and constructs are known in the art.

### V. Pharmaceutical Compositions of the Invention

[0617] The present invention also includes pharmaceutical compositions and formulations which include the iRNAs of the invention. In one embodiment, provided herein are pharmaceutical compositions containing an iRNA, as described herein, and a pharmaceutically acceptable carrier.

[0618] The pharmaceutical compositions containing the iRNA are useful for preventing or treating a C3-associated disorder, e.g., paroxysmal nocturnal hemoglobinuria (PNH), atypical hemolytic uremic syndrome (aHUS), atypical hemolytic uremic syndrome (aHUS), neuromyelitis optica (NMO), multifocal motor neuropathy (MMN), myasthenia gravis (MG), C3 glomerulonephritis, or systemic lupus erythmatosis.

[0619] Such pharmaceutical compositions are formulated based on the mode of delivery. One example is compositions that are formulated for systemic administration via parenteral delivery, e.g., by subcutaneous (SC), intramuscular (IM), or intravenous (IV) delivery. The pharmaceutical compositions of the invention may be administered in dosages sufficient to inhibit expression of a C3 gene.

[0620] In some embodiments, the pharmaceutical compositions of the invention are sterile. In another embodiment, the pharmaceutical compositions of the invention are pyrogen free.

[0621] The pharmaceutical compositions of the invention may be administered in dosages sufficient to inhibit expression of a C3 gene. In general, a suitable dose of an iRNA of the invention will be in the range of about 0.001 to about 200.0 milligrams per kilogram body weight of the recipient per day, generally in the range of about 1 to 50 mg per kilogram body weight per day. Typically, a suitable dose of an iRNA of the invention will be in the range of about 0.1 mg/kg to about 5.0 mg/kg, such as, about 0.3 mg/kg and about 3.0 mg/kg. A repeat-dose regimen may include administration of a therapeutic amount of iRNA on a regular basis, such as every month, once every 3-6 months, or once a year. In certain embodiments, the iRNA is administered about once per month to about once per six months.

[0622] After an initial treatment regimen, the treatments can be administered on a less frequent basis. Duration of treatment can be determined based on the severity of disease.

[0623] In other embodiments, a single dose of the pharmaceutical compositions can be long lasting, such that doses are administered at not more than 1, 2, 3, or 4 month intervals. In some embodiments of the invention, a single dose of the pharmaceutical compositions of the invention is administered about once per month. In other embodiments of the invention, a single dose of the pharmaceutical compositions of the invention is administered quarterly (i.e., about every three months). In other embodiments of the invention, a single dose of the pharmaceutical compositions of the invention is administered twice per year (i.e., about once every six months).

[0624] The skilled artisan will appreciate that certain factors can influence the dosage and timing required to effectively treat a subject, including but not limited to mutations present in the subject, previous treatments, the general health or age of the subject, and other diseases present. Moreover, treatment of a subject with a prophylactically or therapeutically effective amount, as appropriate, of a composition can include a single treatment or a series of treatments.

[0625] The pharmaceutical compositions of the present disclosure can be administered in a number of ways depending upon whether local or systemic treatment is desired and upon the area to be treated. Administration may be topical (including ophthalmic, vaginal, rectal, intranasal, transdermal), oral, or parenteral. Parenteral administration includes intravenous, intraarterial, subcutaneous, intraperitoneal or intramuscular injection or infusion; subdermal, e.g., via an implanted device; or intracranial, e.g., by intraparenchymal, intrathecal or intraventricular, administration.

[0626] The iRNA can be delivered in a manner to target a particular tissue, such as the liver.

[0627] Pharmaceutical compositions and formulations for topical administration can include transdermal patches, ointments, lotions, creams, gels, drops, suppositories, sprays, liquids and powders. Conventional pharmaceutical carriers, aqueous, powder or oily bases, thickeners and the like can be necessary or desirable. Coated condoms, gloves and the like can also be useful. Suitable topical formulations include those in which the RNAi agents featured in the disclosure are in admixture with a topical delivery agent such as lipids, liposomes, fatty acids, fatty acid esters, steroids, chelating agents and surfactants. Suitable lipids and liposomes include neutral (e.g., diolcoylphosphatidyl DOPE ethanolamine, dimyristoylphosphatidyl choline DMPC, distearolyphosphatidyl choline) negative (e.g., dimyristoylphosphatidyl glycerol DMPG) and cationic (e.g., diolcoyltetramethylaminopropyl DOTAP and diolcoylphosphatidyl ethanolamine DOTMA). RNAi agents featured in the disclosure can be encapsulated within liposomes or can form complexes thereto, in particular to cationic liposomes. Alternatively, RNAi agents can be complexed to lipids, in particular to cationic lipids. Suitable fatty acids and esters include but are not limited to arachidonic acid, oleic acid, eicosanoic acid, lauric acid, caprylic acid, capric acid, myristic acid, palmitic acid, stearic acid, linoleic acid, linolenic acid, dicaprate, tricaprate, monoolein, dilaurin, glyceryl 1-monocaprate, 1-dodecylazacycloheptan-2-one, an acylcarnitine, an acylcholine, or a C1-20 alkyl ester (e.g., isopropylmyristate IPM), monoglyceride, diglyceride or pharmaceutically acceptable salt thereof. Topical formulations are described in detail in U.S. Pat. No. 6,747,014, which is incorporated herein by reference.

[0628] In one embodiment, the siRNAs, double stranded RNA agents of the invention, are administered to a cell in a pharmaceutical composition by a topical route of administration.

In one embodiment, the pharmaceutical composition may include an siRNA compound mixed with a topical delivery agent. The topical delivery agent can be a plurality of microscopic vesicles. The microscopic vesicles can be liposomes. In some embodiments the liposomes are cationic liposomes.

[0629] In another embodiment, the dsRNA agent is admixed with a topical penetration enhancer. In one embodiment, the topical penetration enhancer is a fatty acid. The fatty acid can be arachidonic acid, oleic acid, lauric acid, caprylic acid, capric acid, myristic acid, palmitic acid, stearic acid, linoleic acid, linolenic acid, dicaprate, tricaprate, monolein, dilaurin, glyceryl 1-monocaprate, 1-dodecylazacycloheptan-2-one, an acylcarnitine, an acylcholine, or a C1-10 alkyl ester, monoglyceride, diglyceride or pharmaceutically acceptable salt thereof.

[0630] In another embodiment, the topical penetration enhancer is a bile salt. The bile salt can be cholic acid, dehydrocholic acid, deoxycholic acid, glucholic acid, glycholic acid, glycodeoxycholic acid, taurocholic acid, taurodeoxycholic acid, chenodeoxycholic acid, ursodeoxycholic acid, sodium tauro-24,25-dihydro-fusidate, sodium glycodihydrofusidate, polyoxyethylene-9-lauryl ether or a pharmaceutically acceptable salt thereof.

[0631] In another embodiment, the penetration enhancer is a chelating agent. The chelating agent can be EDTA, citric acid, a salicyclate, a N-acyl derivative of collagen, laureth-9, an N-amino acyl derivative of a beta-diketone or a mixture thereof.

[0632] In another embodiment, the penetration enhancer is a surfactant, e.g., an ionic or nonionic surfactant. The surfactant can be sodium lauryl sulfate, polyoxyethylene-9-lauryl ether, polyoxyethylene-20-cetyl ether, a perfluorchemical emulsion or mixture thereof.

[0633] In another embodiment, the penetration enhancer can be selected from a group consisting of unsaturated cyclic ureas, 1-alkyl-alkones, 1-alkenylazacyclo-alakanones, steroidal anti-inflammatory agents and mixtures thereof. In yet another embodiment the penetration enhancer can be a glycol, a pyrrol, an azone, or a terpenes.

[0634] In one aspect, the invention features a pharmaceutical composition including an siRNA compound, e.g., a double-stranded siRNA compound, or ssiRNA compound, (e.g., a precursor, e.g., a larger siRNA compound which can be processed into a ssiRNA compound, or a DNA which encodes an siRNA compound, e.g., a double-stranded siRNA compound, or ssiRNA compound, or precursor thereof) in an injectable dosage form. In one embodiment, the injectable dosage form of the pharmaceutical composition includes sterile aqueous solutions or dispersions and sterile powders. In some embodiments the sterile solution can include a diluent such as water; saline solution; fixed oils, polyethylene glycols, glycerin, or propylene glycol.

[0635] The iRNA molecules of the invention can be incorporated into pharmaceutical compositions. Such compositions typically include one or more species of iRNA and a pharmaceutically acceptable carrier. As used herein the language “pharmaceutically acceptable carrier” is intended to include any and all solvents, dispersion media, coatings, antibacterial and antifungal agents, isotonic and absorption delaying agents, and the like, compatible with pharmaceutical administration to a cell, e.g., a liver cell. The use of such media and agents for pharmaceutically active substances is well known in the art. Except insofar as any conventional media or agent is incompatible with the active compound, use thereof in the compositions is contemplated. Supplementary active compounds can also be incorporated into the compositions.

[0636] Pharmaceutical compositions of the present invention include, but are not limited to, solutions, emulsions, and liposome-containing formulations. These compositions can be generated from a variety of components that include, but are not limited to, preformed liquids, self-emulsifying solids, and self-emulsifying semisolids. Formulations include those that target the liver.

[0637] The pharmaceutical formulations of the present invention, which can conveniently be presented in unit dosage form, can be prepared according to conventional techniques well known in the pharmaceutical industry. Such techniques include the step of bringing into association the active ingredients with the pharmaceutical carrier(s) or excipient(s). In general, the formulations are prepared by uniformly and intimately bringing into association the active ingredients with liquid carriers.

### A. Additional Formulations

i. Emulsions

[0638] The compositions of the present invention can be prepared and formulated as emulsions. Emulsions are typically heterogeneous systems of one liquid dispersed in another in the form of droplets usually exceeding 0.1 μm in diameter (see e.g., Ansel's Pharmaceutical Dosage Forms and Drug Delivery Systems, Allen, LV., Popovich NG., and Ansel HC., 2004, Lippincott Williams & Wilkins (8th ed.), New York, NY; Idson, in Pharmaceutical Dosage Forms, Lieberman, Rieger and Banker (Eds.), 1988, Marcel Dekker, Inc., New York, N.Y., volume 1, p. 199; Rosoff, in Pharmaceutical Dosage Forms, Lieberman, Rieger and Banker (Eds.), 1988, Marcel Dekker, Inc., New York, N.Y., Volume 1, p. 245; Block in Pharmaceutical Dosage Forms, Lieberman, Rieger and Banker (Eds.), 1988, Marcel Dekker, Inc., New York, N.Y., volume 2, p. 335; Higuchi et al., in Remington's Pharmaceutical Sciences, Mack Publishing Co., Easton, Pa., 1985, p. 301). Emulsions are often biphasic systems comprising two immiscible liquid phases intimately mixed and dispersed with each other. In general, emulsions can be of either the water-in-oil (w/o) or the oil-in-water (o/w) variety. When an aqueous phase is finely divided into and dispersed as minute droplets into a bulk oily phase, the resulting composition is called a water-in-oil (w/o) emulsion. Alternatively, when an oily phase is finely divided into and dispersed as minute droplets into a bulk aqueous phase, the resulting composition is called an oil-in-water (o/w) emulsion. Emulsions can contain additional components in addition to the dispersed phases, and the active drug which can be present as a solution either in the aqueous phase, oily phase or itself as a separate phase. Pharmaceutical excipients such as emulsifiers, stabilizers, dyes, and anti-oxidants can also be present in emulsions as needed. Pharmaceutical emulsions can also be multiple emulsions that are comprised of more than two phases such as, for example, in the case of oil-in-water-in-oil (o/w/o) and water-in-oil-in-water (w/o/w) emulsions. Such complex formulations often provide certain advantages that simple binary emulsions do not. Multiple emulsions in which individual oil droplets of an o/w emulsion enclose small water droplets constitute a w/o/w emulsion. Likewise a system of oil droplets enclosed in globules of water stabilized in an oily continuous phase provides an o/w/o emulsion.

[0639] Emulsions are characterized by little or no thermodynamic stability. Often, the dispersed or discontinuous phase of the emulsion is well dispersed into the external or continuous phase and maintained in this form through the means of emulsifiers or the viscosity of the formulation. Other means of stabilizing emulsions entail the use of emulsifiers that can be incorporated into either phase of the emulsion. Emulsifiers can broadly be classified into four categories: synthetic surfactants, naturally occurring emulsifiers, absorption bases, and finely dispersed solids (see e.g., Ansel's Pharmaceutical Dosage Forms and Drug Delivery Systems, Allen, LV., Popovich NG., and Ansel HC., 2004, Lippincott Williams & Wilkins (8th ed.), New York, NY; Idson, in Pharmaceutical Dosage Forms, Lieberman, Rieger and Banker (Eds.), 1988, Marcel Dekker, Inc., New York, N.Y., volume 1, p. 199).

[0640] Synthetic surfactants, also known as surface active agents, have found wide applicability in the formulation of emulsions and have been reviewed in the literature (see e.g., Ansel's Pharmaceutical Dosage Forms and Drug Delivery Systems, Allen, LV., Popovich NG., and Ansel HC., 2004, Lippincott Williams & Wilkins (8th ed.), New York, NY; Rieger, in Pharmaceutical Dosage Forms, Lieberman, Rieger and Banker (Eds.), 1988, Marcel Dekker, Inc., New York, N.Y., volume 1, p. 285; Idson, in Pharmaceutical Dosage Forms, Lieberman, Rieger and Banker (Eds.), Marcel Dekker, Inc., New York, N.Y., 1988, volume 1, p. 199). Surfactants are typically amphiphilic and comprise a hydrophilic and a hydrophobic portion. The ratio of the hydrophilic to the hydrophobic nature of the surfactant has been termed the hydrophile/lipophile balance (HLB) and is a valuable tool in categorizing and selecting surfactants in the preparation of formulations. Surfactants can be classified into different classes based on the nature of the hydrophilic group: nonionic, anionic, cationic, and amphoteric (see e.g., Ansel's Pharmaceutical Dosage Forms and Drug Delivery Systems, Allen, LV., Popovich NG., and Ansel HC., 2004, Lippincott Williams & Wilkins (8th ed.), New York, NY Rieger, in Pharmaceutical Dosage Forms, Lieberman, Rieger and Banker (Eds.), 1988, Marcel Dekker, Inc., New York, N.Y., volume 1, p. 285).

[0641] A large variety of non-emulsifying materials are also included in emulsion formulations and contribute to the properties of emulsions. These include fats, oils, waxes, fatty acids, fatty alcohols, fatty esters, humectants, hydrophilic colloids, preservatives, and antioxidants (Block, in Pharmaceutical Dosage Forms, Lieberman, Rieger and Banker (Eds.), 1988, Marcel Dekker, Inc., New York, N.Y., volume 1, p. 335; Idson, in Pharmaceutical Dosage Forms, Lieberman, Rieger and Banker (Eds.), 1988, Marcel Dekker, Inc., New York, N.Y., volume 1, p. 199).

[0642] The application of emulsion formulations via dermatological, oral, and parenteral routes, and methods for their manufacture have been reviewed in the literature (see e.g., Ansel's Pharmaceutical Dosage Forms and Drug Delivery Systems, Allen, LV., Popovich NG., and Ansel HC., 2004, Lippincott Williams & Wilkins (8th ed.), New York, NY; Idson, in Pharmaceutical Dosage Forms, Lieberman, Rieger and Banker (Eds.), 1988, Marcel Dekker, Inc., New York, N.Y., volume 1, p. 199).

ii. Microemulsions

[0643] In one embodiment of the present invention, the compositions of iRNAs and nucleic acids are formulated as microemulsions. A microemulsion can be defined as a system of water, oil, and amphiphile which is a single optically isotropic and thermodynamically stable liquid solution (see e.g., Ansel's Pharmaceutical Dosage Forms and Drug Delivery Systems, Allen, LV., Popovich NG., and Ansel HC., 2004, Lippincott Williams & Wilkins (8th ed.), New York, NY; Rosoff, in Pharmaceutical Dosage Forms, Lieberman, Rieger and Banker (Eds.), 1988, Marcel Dekker, Inc., New York, N.Y., volume 1, p. 245). Typically microemulsions are systems that are prepared by first dispersing an oil in an aqueous surfactant solution and then adding a sufficient amount of a fourth component, generally an intermediate chain-length alcohol to form a transparent system. Therefore, microemulsions have also been described as thermodynamically stable, isotropically clear dispersions of two immiscible liquids that are stabilized by interfacial films of surface-active molecules (Leung and Shah, in: Controlled Release of Drugs: Polymers and Aggregate Systems, Rosoff, M., Ed., 1989, VCH Publishers, New York, pages 185-215).

iii. Microparticles

[0644] An iRNA of the invention may be incorporated into a particle, e.g., a microparticle. Microparticles can be produced by spray-drying, but may also be produced by other methods including lyophilization, evaporation, fluid bed drying, vacuum drying, or a combination of these techniques.

iv. Penetration Enhancers

[0645] In one embodiment, the present invention employs various penetration enhancers to effect the efficient delivery of nucleic acids, particularly iRNAs, to the skin of animals. Most drugs are present in solution in both ionized and nonionized forms. However, usually only lipid soluble or lipophilic drugs readily cross cell membranes. It has been discovered that even non-lipophilic drugs can cross cell membranes if the membrane to be crossed is treated with a penetration enhancer. In addition to aiding the diffusion of non-lipophilic drugs across cell membranes, penetration enhancers also enhance the permeability of lipophilic drugs.

[0646] Penetration enhancers can be classified as belonging to one of five broad categories, i.e., surfactants, fatty acids, bile salts, chelating agents, and non-chelating non-surfactants (see e.g., Malmsten, M. Surfactants and polymers in drug delivery, Informa Health Care, New York, NY, 2002; Lee et al., Critical Reviews in Therapeutic Drug Carrier Systems, 1991, p. 92). Each of the above mentioned classes of penetration enhancers and their use in manufacture of pharmaceutical compositions and delivery of pharmaceutical agents are well known in the art.

v. Excipients

[0647] In contrast to a carrier compound, a “pharmaceutical carrier” or “excipient” is a pharmaceutically acceptable solvent, suspending agent, or any other pharmacologically inert vehicle for delivering one or more nucleic acids to an animal. The excipient can be liquid or solid and is selected, with the planned manner of administration in mind, so as to provide for the desired bulk, consistency, etc., when combined with a nucleic acid and the other components of a given pharmaceutical composition. Such agent are well known in the art.

vi. Other Components

[0648] The compositions of the present invention can additionally contain other adjunct components conventionally found in pharmaceutical compositions, at their art-established usage levels. Thus, for example, the compositions can contain additional, compatible, pharmaceutically-active materials such as, for example, antipruritics, astringents, local anesthetics or anti-inflammatory agents, or can contain additional materials useful in physically formulating various dosage forms of the compositions of the present invention, such as dyes, flavoring agents, preservatives, antioxidants, opacifiers, thickening agents and stabilizers. However, such materials, when added, should not unduly interfere with the biological activities of the components of the compositions of the present invention. The formulations can be sterilized and, if desired, mixed with auxiliary agents, e.g., lubricants, preservatives, stabilizers, wetting agents, emulsifiers, salts for influencing osmotic pressure, buffers, colorings, flavorings, or aromatic substances, and the like which do not deleteriously interact with the nucleic acid(s) of the formulation.

[0649] Aqueous suspensions can contain substances which increase the viscosity of the suspension including, for example, sodium carboxymethylcellulose, sorbitol, or dextran. The suspension can also contain stabilizers.

[0650] In some embodiments, pharmaceutical compositions featured in the invention include (a) one or more iRNA and (b) one or more agents which function by a non-iRNA mechanism and which are useful in treating a C3-associated disorder, e.g., paroxysmal nocturnal hemoglobinuria (PNH), atypical hemolytic uremic syndrome (aHUS), atypical hemolytic uremic syndrome (aHUS), neuromyelitis optica (NMO), multifocal motor neuropathy (MMN), myasthenia gravis (MG), C3 glomerulonephritis, or systemic lupus erythmatosis.

[0651] Toxicity and prophylactic efficacy of such compounds can be determined by standard pharmaceutical procedures in cell cultures or experimental animals, e.g., for determining the LD50 (the dose lethal to 50% of the population) and the ED50 (the dose prophylactically effective in 50% of the population). The dose ratio between toxic and therapeutic effects is the therapeutic index and it can be expressed as the ratio LD50/ED50. Compounds that exhibit high therapeutic indices are preferred.

[0652] The data obtained from cell culture assays and animal studies can be used in formulating a range of dosage for use in humans. The dosage of compositions featured herein in the invention lies generally within a range of circulating concentrations that include the ED50, such as, an ED80 or ED90, with little or no toxicity. The dosage can vary within this range depending upon the dosage form employed and the route of administration utilized. For any compound used in the methods featured in the invention, the prophylactically effective dose can be estimated initially from cell culture assays. A dose can be formulated in animal models to achieve a circulating plasma concentration range of the compound or, when appropriate, of the polypeptide product of a target sequence (e.g., achieving a decreased concentration of the polypeptide) that includes the IC50 (i.e., the concentration of the test compound which achieves a half-maximal inhibition of symptoms) or higher levels of inhibition as determined in cell culture. Such information can be used to more accurately determine useful doses in humans. Levels in plasma can be measured, for example, by high performance liquid chromatography.

[0653] In addition to their administration, as discussed above, the iRNAs featured in the invention can be administered in combination with other known agents used for the prevention or treatment of a C3-associated disorder, e.g., paroxysmal nocturnal hemoglobinuria (PNH), atypical hemolytic uremic syndrome (aHUS), atypical hemolytic uremic syndrome (aHUS), neuromyelitis optica (NMO), multifocal motor neuropathy (MMN), myasthenia gravis (MG), C3 glomerulonephritis, or systemic lupus erythmatosis. In any event, the administering physician can adjust the amount and timing of iRNA administration on the basis of results observed using standard measures of efficacy known in the art or described herein.

### VI. Methods For Inhibiting C3 Expression

[0654] The present invention also provides methods of inhibiting expression of a C3 gene in a cell. The methods include contacting a cell with an RNAi agent, e.g., double stranded RNA agent, in an amount effective to inhibit expression of C3 in the cell, thereby inhibiting expression of C3 in the cell. In some embodiments of the disclosure, expression of a C3 gene is inhibited preferentially in the liver (e.g., hepatocytes).

[0655] Contacting of a cell with an iRNA, e.g., a double stranded RNA agent, may be done in vitro or in vivo. Contacting a cell in vivo with the iRNA includes contacting a cell or group of cells within a subject, e.g., a human subject, with the iRNA. Combinations of in vitro and in vivo methods of contacting a cell are also possible. Contacting a cell may be direct or indirect, as discussed above. Furthermore, contacting a cell may be accomplished via a targeting ligand, including any ligand described herein or known in the art. In some embodiments, the targeting ligand is a carbohydrate moiety, e.g., a GalNAc₃ ligand, or any other ligand that directs the RNAi agent to a site of interest.

[0656] The term “inhibiting.” as used herein, is used interchangeably with “reducing.” “silencing.” “downregulating”, “suppressing”, and other similar terms, and includes any level of inhibition.

[0657] The phrase “inhibiting expression of a C₃” is intended to refer to inhibition of expression of any C3 gene (such as, e.g., a mouse C3 gene, a rat C3 gene, a monkey C3 gene, or a huma C3 gene) as well as variants or mutants of a C3 gene. Thus, the C3 gene may be a wild-type C3 gene, a mutant C3 gene, or a transgenic C3 gene in the context of a genetically manipulated cell, group of cells, or organism.

[0658] “Inhibiting expression of a C3 gene” includes any level of inhibition of a C3 gene, e.g., at least partial suppression of the expression of a C3 gene. The expression of the C3 gene may be assessed based on the level, or the change in the level, of any variable associated with C3 gene expression, e.g., C3 mRNA level or C3 protein level. This level may be assessed in an individual cell or in a group of cells, including, for example, a sample derived from a subject.

[0659] Inhibition may be assessed by a decrease in an absolute or relative level of one or more variables that are associated with C3 expression compared with a control level. The control level may be any type of control level that is utilized in the art, e.g., a pre-dose baseline level, or a level determined from a similar subject, cell, or sample that is untreated or treated with a control (such as, e.g., buffer only control or inactive agent control).

[0660] In some embodiments of the methods of the invention, expression of a C3 gene is inhibited by at least 50%, 55%, 60%, 65%, 70%, 75%, 80%, 85%, 90%, or 95%, or to below the level of detection of the assay. In some embodiments, expression of a C3 gene is inhibited by at least 70%. It is further understood that inhibition of C3 expression in certain tissues, e.g., in liver, without a significant inhibition of expression in other tissues, e.g., brain, may be desirable. In some embodiments, expression level is determined using the assay method provided in Example 2 with a 10 nM siRNA concentration in the appropriate species matched cell line.

[0661] In certain embodiments, inhibition of expression in vivo is determined by knockdown of the human gene in a rodent expressing the human gene, e.g., an AAV-infected mouse expressing the human target gene (i.e., C3), e.g., when administered as a single dose, e.g., at 3 mg/kg at the nadir of RNA expression. Knockdown of expression of an endogenous gene in a model animal system can also be determined, e.g., after administration of a single dose at, e.g., 3 mg/kg at the nadir of RNA expression. Such systems are useful when the nucleic acid sequence of the human gene and the model animal gene are sufficiently close such that the human iRNA provides effective knockdown of the model animal gene. RNA expression in liver is determined using the PCR methods provided in Example 2.

[0662] Inhibition of the expression of a C3 gene may be manifested by a reduction of the amount of mRNA expressed by a first cell or group of cells (such cells may be present, for example, in a sample derived from a subject) in which a C3 gene is transcribed and which has or have been treated (e.g., by contacting the cell or cells with an iRNA of the invention, or by administering an iRNA of the invention to a subject in which the cells are or were present) such that the expression of a C3 gene is inhibited, as compared to a second cell or group of cells substantially identical to the first cell or group of cells but which has not or have not been so treated (control cell(s) not treated with an iRNA or not treated with an iRNA targeted to the gene of interest). In some embodiments, the inhibition is assessed by the method provided in Example 2 using a 10 nM siRNA concentration in the species matched cell line and expressing the level of mRNA in treated cells as a percentage of the level of mRNA in control cells, using the following formula:

$$\frac{( mRNA in control cells ) - ( mRNA in treated cells )}{( mRNA in control cells )} 100 \%$$

[0663] In other embodiments, inhibition of the expression of a C3 gene may be assessed in terms of a reduction of a parameter that is functionally linked to C3 gene expression, e.g., C3 protein level in blood or serum from a subject. C3 gene silencing may be determined in any cell expressing C3, either endogenous or heterologous from an expression construct, and by any assay known in the art.

[0664] Inhibition of the expression of a C3 protein may be manifested by a reduction in the level of the C3 protein that is expressed by a cell or group of cells or in a subject sample (e.g., the level of protein in a blood sample derived from a subject). As explained above, for the assessment of mRNA suppression, the inhibition of protein expression levels in a treated cell or group of cells may similarly be expressed as a percentage of the level of protein in a control cell or group of cells, or the change in the level of protein in a subject sample, e.g., blood or serum derived therefrom.

[0665] A control cell, a group of cells, or subject sample that may be used to assess the inhibition of the expression of a C3 gene includes a cell, group of cells, or subject sample that has not yet been contacted with an RNAi agent of the invention. For example, the control cell, group of cells, or subject sample may be derived from an individual subject (e.g., a human or animal subject) prior to treatment of the subject with an RNAi agent or an appropriately matched population control.

[0666] The level of C3 mRNA that is expressed by a cell or group of cells may be determined using any method known in the art for assessing mRNA expression. In one embodiment, the level of expression of C3 in a sample is determined by detecting a transcribed polynucleotide, or portion thereof, e.g., mRNA of the C3 gene. RNA may be extracted from cells using RNA extraction techniques including, for example, using acid phenol/guanidine isothiocyanate extraction (RNAzol B; Biogenesis), RNeasy™ RNA preparation kits (Qiagen®) or PAXgene™ (PreAnalytix™, Switzerland). Typical assay formats utilizing ribonucleic acid hybridization include nuclear run-on assays, RT-PCR, RNase protection assays, northern blotting, in situ hybridization, and microarray analysis.

[0667] In some embodiments, the level of expression of C3 is determined using a nucleic acid probe. The term “probe”, as used herein, refers to any molecule that is capable of selectively binding to a specific C3. Probes can be synthesized by one of skill in the art, or derived from appropriate biological preparations. Probes may be specifically designed to be labeled. Examples of molecules that can be utilized as probes include, but are not limited to, RNA, DNA, proteins, antibodies, and organic molecules.

[0668] Isolated mRNA can be used in hybridization or amplification assays that include, but are not limited to, Southern or northern analyses, polymerase chain reaction (PCR) analyses and probe arrays. One method for the determination of mRNA levels involves contacting the isolated mRNA with a nucleic acid molecule (probe) that can hybridize to C3 mRNA. In one embodiment, the mRNA is immobilized on a solid surface and contacted with a probe, for example by running the isolated mRNA on an agarose gel and transferring the mRNA from the gel to a membrane, such as nitrocellulose. In an alternative embodiment, the probe(s) are immobilized on a solid surface and the mRNA is contacted with the probe(s), for example, in an Affymetrix® gene chip array. A skilled artisan can readily adapt known mRNA detection methods for use in determining the level of C3 mRNA.

[0669] An alternative method for determining the level of expression of C3 in a sample involves the process of nucleic acid amplification or reverse transcriptase (to prepare cDNA) of for example mRNA in the sample, e.g., by RT-PCR (the experimental embodiment set forth in Mullis, 1987, U.S. Pat. No. 4,683,202), ligase chain reaction (Barany (1991) Proc. Natl. Acad. Sci. USA 88:189-193), self sustained sequence replication (Guatelli et al. (1990) Proc. Natl. Acad. Sci. USA 87:1874-1878), transcriptional amplification system (Kwoh et al. (1989) Proc. Natl. Acad. Sci. USA 86:1173-1177), Q-Beta Replicase (Lizardi et al. (1988) Bio/Technology 6:1197), rolling circle replication (Lizardi et al., U.S. Pat. No. 5,854,033) or any other nucleic acid amplification method, followed by the detection of the amplified molecules using techniques well known to those of skill in the art. These detection schemes are especially useful for the detection of nucleic acid molecules if such molecules are present in very low numbers. In particular aspects of the invention, the level of expression of C3 is determined by quantitative fluorogenic RT-PCR (i.e., the TaqMan™ System). In some embodiments, expression level is determined by the method provided in Example 2 using, e.g., a 10 nM siRNA concentration, in the species matched cell line.

[0670] The expression levels of C3 mRNA may be monitored using a membrane blot (such as used in hybridization analysis such as northern, Southern, dot, and the like), or microwells, sample tubes, gels, beads or fibers (or any solid support comprising bound nucleic acids). See U.S. Pat. Nos. 5,770,722, 5,874,219, 5,744,305, 5,677,195 and 5,445,934, which are incorporated herein by reference. The determination of C3 expression level may also comprise using nucleic acid probes in solution.

[0671] In some embodiments, the level of mRNA expression is assessed using branched DNA (bDNA) assays or real time PCR (qPCR). The use of these methods is described and exemplified in the Examples presented herein. In some embodiments, expression level is determined by the method provided in Example 2 using a 10 nM siRNA concentration in the species matched cell line.

[0672] The level of C3 protein expression may be determined using any method known in the art for the measurement of protein levels. Such methods include, for example, electrophoresis, capillary electrophoresis, high performance liquid chromatography (HPLC), thin layer chromatography (TLC), hyperdiffusion chromatography, fluid or gel precipitin reactions, absorption spectroscopy, a colorimetric assays, spectrophotometric assays, flow cytometry, immunodiffusion (single or double), immunoelectrophoresis, western blotting, radioimmunoassay (RIA), enzyme-linked immunosorbent assays (ELISAs), immunofluorescent assays, electrochemiluminescence assays, and the like.

[0673] In some embodiments, the efficacy of the methods of the invention are assessed by a decrease in C3 mRNA or protein level (e.g., in a liver biopsy).

[0674] In some embodiments, the efficacy of the methods of the invention can be monitored by detecting or monitoring a reduction in a symptom of a C3-associate disorder. It is well within the ability of one skilled in the art to monitor efficacy of the methods by measuring any one of such parameters, or any combination of parameters.

[0675] In some embodiments of the methods of the invention, the iRNA is administered to a subject such that the iRNA is delivered to a specific site within the subject. The inhibition of expression of C3 may be assessed using measurements of the level or change in the level of C3 mRNA or C3 protein in a sample derived from fluid or tissue from the specific site within the subject (e.g., liver or blood).

[0676] As used herein, the terms detecting or determining a level of an analyte are understood to mean performing the steps to determine if a material, e.g., protein, RNA, is present. As used herein, methods of detecting or determining include detection or determination of an analyte level that is below the level of detection for the method used.

### VII. Prophylactic and Treatment Methods of the Invention

[0677] The present invention also provides methods of using an iRNA of the invention or a composition containing an iRNA of the invention to inhibit expression of C3, thereby preventing or treating a C3-associated disorder, e.g., paroxysmal nocturnal hemoglobinuria (PNH), atypical hemolytic uremic syndrome (aHUS), atypical hemolytic uremic syndrome (aHUS), neuromyelitis optica (NMO), multifocal motor neuropathy (MMN), myasthenia gravis (MG), C3 glomerulonephritis, or systemic lupus erythmatosis. In the methods of the invention the cell may be contacted with the siRNA in vitro or in vivo, i.e., the cell may be within a subject.

[0678] A cell suitable for treatment using the methods of the invention may be any cell that expresses a C3 gene, e.g., a liver cell. A cell suitable for use in the methods of the invention may be a mammalian cell, e.g., a primate cell (such as a human cell, including human cell in a chimeric non-human animal, or a non-human primate cell, e.g., a monkey cell or a chimpanzee cell), or a non-primate cell. In certain embodiments, the cell is a human cell, e.g., a human liver cell. In the methods of the invention, C3 expression is inhibited in the cell by at least 50, 55, 60, 65, 70, 75, 80, 85, 90, or 95, or to a level below the level of detection of the assay.

[0679] The in vivo methods of the invention may include administering to a subject a composition containing an iRNA, where the iRNA includes a nucleotide sequence that is complementary to at least a part of an RNA transcript of the C3 gene of the mammal to which the RNAi agent is to be administered. The composition can be administered by any means known in the art including, but not limited to oral, intraperitoneal, or parenteral routes, including intracranial (e.g., intraventricular, intraparenchymal, and intrathecal), intravenous, intramuscular, subcutaneous, transdermal, airway (aerosol), nasal, rectal, intraocular (e.g., periocular, conjunctival, subtenon, intracameral, intravitreal, intraocular, anterior or posterior juxtascleral, subretinal, subconjunctival, retrobulbar, or intracanalicular injection), intravenous, intramuscular, subcutaneous, transdermal, airway (aerosol), and topical (including buccal and sublingual) administration.

[0680] In certain embodiments, the compositions are administered by intravenous infusion or injection. In certain embodiments, the compositions are administered by subcutaneous injection. In certain embodiments, the compositions are administered by intramuscular injection.

[0681] The mode of administration may be chosen based upon whether local or systemic treatment is desired and based upon the area to be treated. The route and site of administration may be chosen to enhance targeting.

[0682] In one aspect, the present invention also provides methods for inhibiting the expression of a C3 gene in a mammal. The methods include administering to the mammal a composition comprising a dsRNA that targets a C3 gene in a cell of the mammal and maintaining the mammal for a time sufficient to obtain degradation of the mRNA transcript of the C3 gene, thereby inhibiting expression of the C3 gene in the cell. Reduction in gene expression can be assessed by any methods known in the art and by methods, e.g. qRT-PCR, described herein, e.g., in Example 2. Reduction in protein production can be assessed by any methods known it the art, e.g. ELISA. In certain embodiments, a puncture liver biopsy sample serves as the tissue material for monitoring the reduction in the C3 gene or protein expression. In other embodiments, a blood sample serves as the subject sample for monitoring the reduction in the C3 protein expression.

[0683] The present invention further provides methods of treatment in a subject in need thereof, e.g., a subject diagnosed with a C3-associated disorder, such as paroxysmal nocturnal hemoglobinuria (PNH), atypical hemolytic uremic syndrome (aHUS), atypical hemolytic uremic syndrome (aHUS), neuromyelitis optica (NMO), multifocal motor neuropathy (MMN), myasthenia gravis (MG), C3 glomerulonephritis, or systemic lupus erythmatosis.

[0684] The present invention further provides methods of prophylaxis in a subject in need thereof. The treatment methods of the invention include administering an iRNA of the invention to a subject, e.g., a subject that would benefit from a reduction of C3 expression, in a prophylactically effective amount of a dsRNA targeting a C3 gene or a pharmaceutical composition comprising a dsRNA targeting a C3 gene.

[0685] In one aspect, the present invention provides methods of treating a subject having a disorder that would benefit from reduction in C3 expression, e.g., a C3-associated disorder, such as paroxysmal nocturnal hemoglobinuria (PNH), atypical hemolytic uremic syndrome (aHUS), atypical hemolytic uremic syndrome (aHUS), neuromyelitis optica (NMO), multifocal motor neuropathy (MMN), myasthenia gravis (MG), C3 glomerulonephritis, or systemic lupus erythmatosis. In some embodiments, the RNAi agent is administered to a subject in an amount effective to inhibit C3 expression in a cell within the subject. The amount effective to inhibit C3 expression in a cell within a subject may be assessed using methods discussed above, including methods that involve assessment of the inhibition of C3 mRNA, C3 protein, or related variables, such as a reduction in the severity of a symptom of a C₃-associated disorder.

[0686] An iRNA of the invention may be administered as a “free iRNA.” A free iRNA is administered in the absence of a pharmaceutical composition. The naked iRNA may be in a suitable buffer solution. The buffer solution may comprise acetate, citrate, prolamine, carbonate, or phosphate, or any combination thereof. In one embodiment, the buffer solution is phosphate buffered saline (PBS). The pH and osmolarity of the buffer solution containing the iRNA can be adjusted such that it is suitable for administering to a subject.

[0687] Alternatively, an iRNA of the invention may be administered as a pharmaceutical composition, such as a dsRNA liposomal formulation.

[0688] Subjects that would benefit from an inhibition of C3 gene expression are subjects susceptible to or diagnosed with a C3-associated disorder, such as paroxysmal nocturnal hemoglobinuria (PNH), atypical hemolytic uremic syndrome (aHUS), atypical hemolytic uremic syndrome (aHUS), neuromyelitis optica (NMO), multifocal motor neuropathy (MMN), myasthenia gravis (MG), C3 glomerulonephritis, or systemic lupus erythmatosis. In an embodiment, the method includes administering a composition featured herein such that expression of the target C3 gene is decreased, such as for about 1, 2, 3, 4, 5, 6, 1-6, 1-3, or 3-6 months per dose. In certain embodiments, the composition is administered once every 3-6 months.

[0689] In one embodiment, the iRNAs useful for the methods and compositions featured herein specifically target RNAs (primary or processed) of the target C3 gene. Compositions and methods for inhibiting the expression of these genes using iRNAs can be prepared and performed as described herein.

[0690] Administration of the iRNA according to the methods of the invention may result prevention or treatment of a C3-associated disorder, e.g., paroxysmal nocturnal hemoglobinuria (PNH), atypical hemolytic uremic syndrome (aHUS), atypical hemolytic uremic syndrome (aHUS), neuromyelitis optica (NMO), multifocal motor neuropathy (MMN), myasthenia gravis (MG), C3 glomerulonephritis, or systemic lupus erythmatosis. Subjects can be administered a therapeutic amount of iRNA, such as about 0.01 mg/kg to about 200 mg/kg.

[0691] In one embodiment, the iRNA is administered subcutaneously, i.e., by subcutaneous injection. One or more injections may be used to deliver the desired dose of iRNA to a subject. The injections may be repeated over a period of time.

[0692] The administration may be repeated on a regular basis. In certain embodiments, after an initial treatment regimen, the treatments can be administered on a less frequent basis. A repeat-dose regimen may include administration of a therapeutic amount of iRNA on a regular basis, such as once per month to once a year. In certain embodiments, the iRNA is administered about once per month to about once every three months, or about once every three months to about once every six months.

[0693] The invention further provides methods and uses of an iRNA agent or a pharmaceutical composition thereof for treating a subject that would benefit from reduction and/or inhibition of C3 gene expression, e.g., a subject having a C3-associated disorder, in combination with other pharmaceuticals and/or other therapeutic methods, e.g., with known pharmaceuticals and/or known therapeutic methods, such as, for example, those which are currently employed for treating these disorders.

[0694] Accordingly, in some aspects of the invention, the methods which include administration of an iRNA agent of the invention, further include administering to the subject one or more additional therapeutic agents. For example, in certain embodiments, an iRNA targeting C3 is administered in combination with, e.g., plasmaphoresis, thrombolytic therapy (e.g., streptokinase), antiplatelet agents, folic acid, corticosteroids; immunosuppressive agents; estrogens, methotrexate, 6-MP, azathioprinc sulphasalazine, mesalazine, olsalazine, chloroquinine/hydroxychloroquine, pencillamine, aurothiomalate (intramuscular and oral), azathioprine, cochicine, corticosteroids (oral, inhaled and local injection), beta-2 adrenoreceptor agonists (salbutamol, terbutaline, salmeteral), xanthines (theophylline, aminophylline), cromoglycate, nedocromil, ketotifen, ipratropium and oxitropium, cyclosporin, FK506, rapamycin, mycophenolate mofetil, leflunomide, NSAIDs, for example, ibuprofen, corticosteroids such as prednisolone, phosphodiesterase inhibitors, adensosine agonists, antithrombotic agents, complement inhibitors, adrenergic agents, agents which interfere with signalling by proinflammatory cytokines, such as TNF-α or IL-1 (e.g., IRAK, NIK, IKK, p38 or MAP kinase inhibitors), IL-1β converting enzyme inhibitors, TNFαconverting enzyme (TACE) inhibitors, T-cell signalling inhibitors, such as kinase inhibitors, metalloproteinase inhibitors, sulfasalazine, azathioprinc, 6-mercaptopurines, angiotensin converting enzyme inhibitors, soluble cytokine receptors and derivatives thereof (e.g., soluble p55 or p75 TNF receptors and the derivatives p75TNFRIgG (Enbrel™ and p55TNFRIgG (Lenercept)), SIL-1RI, SIL-1RII, and sIL-6R), antiinflammatory cytokines (e.g., IL-4, IL-10, IL-11, IL-13 and TGFβ), celecoxib, folic acid, hydroxychloroquine sulfate, rofecoxib, etanercept, infliximonoclonal antibody, naproxen, valdecoxib, sulfasalazine, methylprednisolone, meloxicam, methylprednisolone acetate, gold sodium thiomalate, aspirin, triamcinolone acetonide, propoxyphene napsylate/apap, folate, nabumetone, diclofenac, piroxicam, etodolac, diclofenac sodium, oxaprozin, oxycodone hydrochloride, hydrocodone bitartrate/apap, diclofenac sodium/misoprostol, fentanyl, anakinra, human recombinant, tramadol hydrochloride, salsalate, sulindac, cyanocobalamin/folic acid/pyridoxine, acetaminophen, alendronate sodium, prednisolone, morphine sulfate, lidocaine hydrochloride, indomethacin, glucosamine sulf/chondroitin, amitriptyline hydrochloride, sulfadiazine, oxycodone hydrochloride/acetaminophen, olopatadine hydrochloride, misoprostol, naproxen sodium, omeprazole, cyclophosphamide, rituximonoclonal antibody, IL-1 TRAP, MRA, CTLA4-IG, IL-18 BP, anti-IL-18, Anti-IL15, BIRB-796, SCIO-469, VX-702, AMG-548, VX-740, Roflumilast, IC-485, CDC-801, Mesopram, cyclosporine, cytokine suppressive anti-inflammatory drug(s) (CSAIDs); CDP-571/BAY-10-3356 (humanized anti-TNFα antibody; Celltech/Bayer); cA2/infliximonoclonal antibody (chimeric anti-TNF& antibody; Centocor); 75 kdTNFR-IgG/etanercept (75 kD TNF receptor-IgG fusion protein; Immunex; see e.g., (1994) Arthr. Rheum. 37: S295; (1996) J. Invest. Med. 44: 235A); 55 kdTNF-IgG (55 KD TNF receptor-IgG fusion protein; Hoffmann-LaRoche); IDEC-CE9.1/SB 210396 (non-depleting primatized anti-CD4 antibody; IDEC/SmithKline; see e.g., (1995) Arthr. Rheum. 38: S185); DAB 486-IL-2 and/or DAB 389-IL-2 (IL-2 fusion proteins; Seragen; see e.g., (1993) Arthrit. Rheum. 36:1223); Anti-Tac (humanized anti-IL-2Rα; Protein Design Labs/Roche); IL-4 (anti-inflammatory cytokine; DNAX/Schering); IL-10 (SCH 52000; recombinant IL-10, anti-inflammatory cytokine; DNAX/Schering); IL-4; IL-10 and/or IL-4 agonists (e.g., agonist antibodies); IL-1RA (IL-1 receptor antagonist; Synergen/Amgen); anakinra (Kineret®/Amgen); TNF-bp/s-TNF (soluble TNF binding protein; see e.g., (1996) Arthr. Rheum. 39 (9 (supplement)): S284; (1995) Amer. J. Physiol.-Heart and Circ. Physiol. 268:37-42); R973401 (phosphodiesterase Type IV inhibitor; see e.g., (1996) Arthr. Rheum. 39 (9 (supplement): S282); MK-966 (COX-2 Inhibitor; see e.g., (1996) Arthr. Rheum. 39 (9 (supplement): S81); Iloprost (see e.g., (1996) Arthr. Rheum. 39 (9 (supplement): S82); methotrexate; thalidomide (see e.g., (1996) Arthr. Rheum. 39 (9 (supplement): S282) and thalidomide-related drugs (e.g., Celgen); leflunomide (anti-inflammatory and cytokine inhibitor; see e.g., (1996) Arthr. Rheum. 39 (9 (supplement): S131; (1996) Inflamm. Res. 45:103-107); tranexamic acid (inhibitor of plasminogen activation; see e.g., (1996) Arthr. Rheum. 39 (9 (supplement): S284); T-614 (cytokine inhibitor; see e.g., (1996) Arthr. Rheum. 39 (9 (supplement): S282); prostaglandin E1 (see e.g., (1996) Arthr. Rheum. 39 (9 (supplement): S282); Tenidap (non-steroidal anti-inflammatory drug; see e.g., (1996) Arthr. Rheum. 39 (9 (supplement): S280); Naproxen (non-steroidal anti-inflammatory drug; see e.g., (1996) Neuro. Report 7:1209-1213); Meloxicam (non-steroidal anti-inflammatory drug); Ibuprofen (non-steroidal anti-inflammatory drug); Piroxicam (non-steroidal anti-inflammatory drug); Diclofenac (non-steroidal anti-inflammatory drug); Indomethacin (non-steroidal anti-inflammatory drug); Sulfasalazine (see e.g., (1996) Arthr. Rheum. 39 (9 (supplement): S281); Azathioprine (see e.g., (1996) Arthr. Rheum. 39 (9 (supplement): S281); ICE inhibitor (inhibitor of the enzyme interleukin-1□ converting enzyme); zap-70 and/or lck inhibitor (inhibitor of the tyrosine kinase zap-70 or lck); VEGF inhibitor and/or VEGF-R inhibitor (inhibitors of vascular endothelial cell growth factor or vascular endothelial cell growth factor receptor; inhibitors of angiogenesis); corticosteroid anti-inflammatory drugs (e.g., SB203580); TNF-convertase inhibitors; anti-IL-12 antibodies; anti-IL-18 antibodies; interleukin-11 (see e.g., (1996) Arthr. Rheum. 39 (9 (supplement): S296); interleukin-13 (see e.g., (1996) Arthr. Rheum. 39 (9 (supplement): S308); interleukin-17 inhibitors (see e.g., (1996) Arthr. Rheum. 39 (9 (supplement): S120); gold; penicillamine; chloroquine; chlorambucil; hydroxychloroquine; cyclosporine; cyclophosphamide; total lymphoid irradiation; anti-thymocyte globulin; anti-CD4 antibodies; CD5-toxins; orally-administered peptides and collagen; lobenzarit disodium; Cytokine Regulating Agents (CRAs) HP228 and HP466 (Houghten Pharmaceuticals, Inc.); ICAM-1 antisense phosphorothioate oligo-deoxynucleotides (ISIS 2302; Isis Pharmaceuticals, Inc.); soluble complement receptor 1 (TP10; T Cell Sciences, Inc.); prednisone; orgotein; glycosaminoglycan polysulphate; minocycline; anti-IL2R antibodies; marine and botanical lipids (fish and plant seed fatty acids; see e.g., DeLuca et al. (1995) Rheum. Dis. Clin. North Am. 21:759-777); auranofin; phenylbutazone; meclofenamic acid; flufenamic acid; intravenous immune globulin; zileuton; azaribine; mycophenolic acid (RS-61443); tacrolimus (FK-506); sirolimus (rapamycin); amiprilose (therafectin); cladribine (2-chlorodeoxyadenosine); methotrexate; bcl-2 inhibitors (see Bruncko. M. et al. (2007) J. Med. Chem. 50 (4): 641-662); antivirals and immune-modulating agents, small molecule inhibitor of KDR, small molecule inhibitor of Tie-2; methotrexate; prednisone; celecoxib; folic acid; hydroxychloroquine sulfate; rofecoxib; etanercept; infliximonoclonal antibody; leflunomide; naproxen; valdecoxib; sulfasalazine; methylprednisolone; ibuprofen; meloxicam; methylprednisolone acetate; gold sodium thiomalate; aspirin; azathioprine; triamcinolone acetonide; propxyphene napsylate/apap; folate; nabumetone; diclofenac; piroxicam; ctodolac; diclofenac sodium; oxaprozin; oxycodone hcl; hydrocodone bitartrate/apap; diclofenac sodium/misoprostol; fentanyl; anakinra, human recombinant; tramadol hcl; salsalate; sulindac; cyanocobalamin/fa/pyridoxine; acetaminophen; alendronate sodium; prednisolone; morphine sulfate; lidocaine hydrochloride; indomethacin; glucosamine sulfate/chondroitin; cyclosporine; amitriptyline hydrochloride; sulfadiazine; oxycodone hel/acetaminophen; olopatadine hcl; misoprostol; naproxen sodium; omeprazole; mycophenolate mofetil; cyclophosphamide; rituximonoclonal antibody; IL-1 TRAP; MRA; CTLA4-IG; IL-18 BP; IL-12/23; anti-IL 18; anti-IL 15; BIRB-796; SCIO-469; VX-702; AMG-548; VX-740; Roflumilast; IC-485; CDC-801; mesopram, albuterol, salmeterol/fluticasone, montelukast sodium, fluticasone propionate, budesonide, prednisone, salmeterol xinafoate, levalbuterol hcl, albuterol sulfate/ipratropium, prednisolone sodium phosphate, triamcinolone acetonide, beclomethasone dipropionate, ipratropium bromide, azithromycin, pirbuterol acetate, prednisolone, theophylline anhydrous, methylprednisolone sodium succinate, clarithromycin, zafirlukast, formoterol fumarate, influenza virus vaccine, methylprednisolone, amoxicillin trihydrate, flunisolide, allergy injection, cromolyn sodium, fexofenadine hydrochloride, flunisolide/menthol, amoxicillin/clavulanate, levofloxacin, inhaler assist device, guaifenesin, dexamethasone sodium phosphate, moxifloxacin hcl, doxycycline hyclate, guaifenesin/d-methorphan, p-ephedrine/cod/chlorphenir, gatifloxacin, cetirizine hydrochloride, mometasone furoate, salmeterol xinafoate, benzonatate, cephalexin, pe/hydrocodone/chlorphenir, cetirizine hcl/pseudoephed, phenylephrine/cod/promethazine, codeine/promethazine, cefprozil, dexamethasone, guaifenesin/pseudoephedrine, chlorpheniramine/hydrocodone, nedocromil sodium, terbutaline sulfate, epinephrine, methylprednisolone, metaproterenol sulfate, aspirin, nitroglycerin, metoprolol tartrate, enoxaparin sodium, heparin sodium, clopidogrel bisulfate, carvedilol, atenolol, morphine sulfate, metoprolol succinate, warfarin sodium, lisinopril, isosorbide mononitrate, digoxin, furosemide, simvastatin, ramipril, tenecteplase, enalapril malcate, torsemide, retavase, losartan potassium, quinapril hcl/mag carb, bumetanide, alteplase, enalaprilat, amiodarone hydrochloride, tirofiban hcl m-hydrate, diltiazem hydrochloride, captopril, irbesartan, valsartan, propranolol hydrochloride, fosinopril sodium, lidocaine hydrochloride, eptifibatide, cefazolin sodium, atropine sulfate, aminocaproic acid, spironolactone, interferon, sotalol hydrochloride, potassium chloride, docusate sodium, dobutamine hcl, alprazolam, pravastatin sodium, atorvastatin calcium, midazolam hydrochloride, meperidine hydrochloride, isosorbide dinitrate, epinephrine, dopamine hydrochloride, bivalirudin, rosuvastatin, ezetimibe/simvastatin, avasimibe, and cariporide.

[0695] In some aspects, the additional therapeutic agent is an iRNA agent targeting a C5 gene, such as described in U.S. Pat. No. 9,249,415, U.S. Provisional Patent Application Nos. 62/174,933, filed on Jun. 12, 2015, 62/263,066, filed on Dec. 4, 2015, the entire contents of each of which are hereby incorporated herein by reference.

[0696] In other aspects, the additional therapeutic agent is an anti-complement component C5 antibody, or antigen-binding fragment thereof (e.g., eculizumab). Eculizumab is a humanized monoclonal IgG2/4, kappa light chain antibody that specifically binds complement component C5 with high affinity and inhibits cleavage of C5 to C5a and C5b, thereby inhibiting the generation of the terminal complement complex C5b-9. Eculizumab is described in U.S. Pat. No. 6,355,245, the entire contents of which are incorporated herein by reference.

[0697] In yet other aspects, the additional therapeutic is a C3 peptide inhibitor, or analog thereof. In one embodiment, the C3 peptide inhibitor is compstatin. Compstatin is a cyclic tridecapeptide with potent and selective C3 inhibitory activity. Compstatin, and its analogs, are described in U.S. Pat. Nos. 7,888,323, 7,989,589, and 8,442,776, in U.S. Patent Publication No. 2012/0178694 and 2013/0053302, and in PCT Publication Nos. WO 2012/174055, WO 2012/2178083, WO 2013/036778, the entire contents of each of which are incorporated herein by reference.

[0698] The iRNA and additional therapeutic agents may be administered at the same time and/or in the same combination, e.g., parenterally, or the additional therapeutic agent can be administered as part of a separate composition or at separate times and/or by another method known in the art or described herein.

[0699] The iRNA agent and an additional therapeutic agent and/or treatment may be administered at the same time and/or in the same combination, e.g., parenterally, or the additional therapeutic agent can be administered as part of a separate composition or at separate times and/or by another method known in the art or described herein.

[0700] Accordingly, in one aspect, the present invention provides methods of treating a subject having a disorder that would benefit from reduction in C3 expression, e.g., a complement component C3-associated disease, e.g., paroxysmal nocturnal hemoglobinuria (PNH), atypical hemolytic uremic syndrome (aHUS), atypical hemolytic uremic syndrome (aHUS), neuromyelitis optica (NMO), multifocal motor neuropathy (MMN), myasthenia gravis (MG). C3 glomerulonephritis, or systemic lupus erythmatosis, which include administering to the subject, e.g., a human, a therapeutically effective amount of an iRNA agent targeting a C3 gene or a pharmaceutical composition comprising an iRNA agent targeting a C3 gene, and an additional therapeutic agent, such as an anti-complement component C5 antibody, or antigen-binding fragment thereof (e.g., eculizumab), an iRNA agent targeting complement component C5, and/or a C3 peptide inhibitor (e.g., compstatin), thereby treating the subject having a disorder that would benefit from reduction in C3 expression.

[0701] In another aspect, the invention provides methods of preventing at least one symptom in a subject having a disorder that would benefit from reduction in C3 expression. e.g., a complement component C3-associated disease, e.g., paroxysmal nocturnal hemoglobinuria (PNH), atypical hemolytic uremic syndrome (aHUS), atypical hemolytic uremic syndrome (aHUS), neuromyelitis optica (NMO), multifocal motor neuropathy (MMN), myasthenia gravis (MG), C3 glomerulonephritis, or systemic lupus erythmatosis. The methods include administering to the subject a therapeutically effective amount of the iRNA agent, e.g., dsRNA, or vector of the invention, and an additional therapeutic agent, such as an anti-complement component C5 antibody, or antigen-binding fragment thereof (e.g., eculizumab), an iRNA agent targeting complement component C5, and/or a C3 peptide inhibitor (e.g., compstatin), thereby preventing at least one symptom in the subject having a disorder that would benefit from reduction in C3 expression.

[0702] In another aspect, the present invention provides uses of a therapeutically effective amount of an iRNA agent of the invention and an additional therapeutic agent, such as an anti-complement component C5 antibody, or antigen-binding fragment thereof (e.g., eculizumab), an iRNA agent targeting complement component C5, and/or a C3 peptide inhibitor (e.g., comstatin), for treating a subject, e.g., a subject that would benefit from a reduction and/or inhibition of C3 expression.

[0703] In another aspect, the present invention provides uses of an iRNA agent. e.g., a dsRNA, of the invention targeting a C3 gene or a pharmaceutical composition comprising an iRNA agent targeting a C3 gene in the manufacture of a medicament for use in combination with an additional therapeutic agent, such as an anti-complement component C5 antibody, or antigen-binding fragment thereof (e.g., eculizumab), an iRNA agent targeting complement component C5, and/or a C3 peptide inhibitor (e.g., compstatin), for treating a subject, e.g., a subject that would benefit from a reduction and/or inhibition of C3 expression, e.g., a complement component C3-associated disease, e.g., paroxysmal nocturnal hemoglobinuria (PNH), atypical hemolytic uremic syndrome (aHUS), atypical hemolytic uremic syndrome (aHUS), neuromyelitis optica (NMO), multifocal motor neuropathy (MMN), myasthenia gravis (MG). C3 glomerulonephritis, or systemic lupus erythmatosis.

[0704] In yet another aspect, the invention provides uses of an iRNA agent. e.g., a dsRNA, of the invention, and an additional therapeutic agent, such as an anti-complement component C5 antibody, or antigen-binding fragment thereof (e.g., eculizumab), an iRNA agent targeting complement component C5, and/or a C3 peptide inhibitor (e.g., compstatin), for preventing at least one symptom in a subject suffering from a disorder that would benefit from a reduction and/or inhibition of C3 expression, such as a complement component C3-associated disease, e.g., paroxysmal nocturnal hemoglobinuria (PNH), atypical hemolytic uremic syndrome (aHUS), atypical hemolytic uremic syndrome (aHUS), neuromyelitis optica (NMO), multifocal motor neuropathy (MMN), myasthenia gravis (MG), C3 glomerulonephritis, or systemic lupus erythmatosis.

[0705] In a further aspect, the present invention provides uses of an iRNA agent of the invention in the manufacture of a medicament for use in combination with an additional therapeutic agent, such as an anti-complement component C5 antibody, or antigen-binding fragment thereof (e.g., eculizumab), an iRNA agent targeting complement component C5, and/or a C3 peptide inhibitor (e.g., compstatin), for preventing at least one symptom in a subject suffering from a disorder that would benefit from a reduction and/or inhibition of C3 expression, such as a a complement component C3-associated disease, e.g., paroxysmal nocturnal hemoglobinuria (PNH), atypical hemolytic uremic syndrome (aHUS), atypical hemolytic uremic syndrome (aHUS), neuromyelitis optica (NMO), multifocal motor neuropathy (MMN), myasthenia gravis (MG), C3 glomerulonephritis, or systemic lupus erythmatosis.

[0706] In one embodiment, an iRNA agent targeting C3 is administered to a subject having a complement component C3-associated disease as described herein such that C3 levels, e.g., in a cell, tissue, blood, urine or other tissue or fluid of the subject are reduced by at least about 10%, 11%, 12%, 13%, 14%, 15%, 16%, 17%, 18%, 19%, 20%, 21%, 22%, 23%, 24%, 25%, 26%, 27%, 28%, 29%, 30%, 31%, 32%, 33%, 34%, 35%, 36%, 37%, 38%, 39%, 40%, 41%, 42%, 43%, 44%, 45%, 46%, 47%, 48%, 49%, 50%, 51%, 52%, 53%, 54%, 55%, 56%, 57%, 58%, 59%, 60%, 61%, 62%, 62%, 64%, 65%, 66%, 67%, 68%, 69%, 70%, 71%, 72%, 73%, 74%, 75%, 76%, 77%, 78%, 79%, 80%, 81%, 82%, 83%, 84%, 85%, 86%, 87%, 88%, 89%, 90%, 91%, 92%, 93%, 94%, 95%, 96%, 97%, 98%, or at least about 99% or more and, subsequently, an additional therapeutic is administered to the subject.

[0707] The additional therapeutic may be an anti-complement component C5 antibody, or antigen-binding fragment or derivative thereof. In one embodiment, the anti-complement component C5 antibody is eculizumab (SOLIRIS®), or antigen-binding fragment or derivative thereof.

[0708] The methods of the invention comprising administration of an iRNA agent of the invention and eculizumab to a subject may further comprise administration of a meningococcal vaccine to the subject.

[0709] The additional therapeutic, e.g., eculizumab and/or a meningococcal vaccine, may be administered to the subject at the same time as the iRNA agent targeting C3 (and/or C5) or at a different time.

[0710] Moreover, the additional therapeutic, e.g., eculizumab, may be administered to the subject in the same formulation as the iRNA agent targeting C3 (and/or C5) or in a different formulation as the iRNA agent targeting C3 (and/or C5).

[0711] Eculizumab dosage regimens are described in, for example, the product insert for eculizumab (SOLIRIS®) and in U.S. Patent Application No. 2012/0225056, the entire contents of each of which are incorporated herein by reference. In exemplary methods of the invention for treating a complement component C3-associated disease, e.g., PNH, aHUS, or rheumatoid arthritis, an iRNA agent targeting, e.g., C3, is administered (e.g., subcutaneously) to the subject first, such that the C5 levels in the subject are reduced (e.g., by at least about 20%, 21%, 22%, 23%, 24%, 25%, 26%, 27%, 28%, 29%, 30%, 31%, 32%, 33%, 34%, 35%, 36%, 37%, 38%, 39%, 40%, 41%, 42%, 43%, 44%, 45%, 46%, 47%, 48%, 49%, 50%, 51%, 52%, 53%, 54%, 55%, 56%, 57%, 58%, 59%, 60%, 61%, 62%, 62%, 64%, 65%, 66%, 67%, 68%, 69%, 70%, 71%, 72%, 73%, 74%, 75%, 76%, 77%, 78%, 79%, 80%, 81%, 82%, 83%, 84%, 85%, 86%, 87%, 88%, 89%, 90%, 91%, 92%, 93%, 94%, 95%, 96%, 97%, 98%, or at least about 99% or more) and subsequently eculizumab is administered at doses lower than the ones described in the product insert for SOLIRIS®. For example, eculizumab may be administered to the subject weekly at a dose less than about 600 mg for 4 weeks followed by a fifth dose at about one week later of less than about 900 mg, followed by a dose less than about 900 mg about every two weeks thereafter. Eculizumab may also be administered to the subject weekly at a dose less than about 900 mg for 4 weeks followed by a fifth dose at about one week later of less than about 1200 mg, followed by a dose less than about 1200 mg about every two weeks thereafter. If the subject is less than 18 years of age, eculizumab may be administered to the subject weekly at a dose less than about 900 mg for 4 weeks followed by a fifth dose at about one week later of less than about 1200 mg, followed by a dose less than about 1200 mg about every two weeks thereafter; or if the subject is less than 18 years of age, eculizumab may be administered to the subject weekly at a dose less than about 600 mg for 2 weeks followed by a third dose at about one week later of less than about 900 mg, followed by a dose less than about 900 mg about every two weeks thereafter; or if the subject is less than 18 years of age, eculizumab may be administered to the subject weekly at a dose less than about 600 mg for 2 weeks followed by a third dose at about one week later of less than about 600 mg, followed by a dose less than about 600 mg about every two weeks thereafter; or if the subject is less than 18 years of age, eculizumab may be administered to the subject weekly at a dose less than about 600 mg for 1 week followed by a second dose at about one week later of less than about 300 mg, followed by a dose less than about 300 mg about every two weeks thereafter; or if the subject is less than 18 years of age, eculizumab may be administered to the subject weekly at a dose less than about 300 mg for 1 week followed by a second dose at about one week later of less than about 300 mg, followed by a dose less than about 300 mg about every two weeks thereafter. If the subject is receiving plamapheresis or plasma exchange, eculizumab may be administered to the subject at a dose less than about 300 mg (e.g., if the most recent does of eculizumab was about 300 mg) or less than about 600 mg (e.g., if the most recent does of eculizumab was about 600 mg or more). If the subject is receiving plasma infusion, eculizumab may be administered to the subject at a dose less than about 300 mg (e.g., if the most recent does of eculizumab was about 300 mg or more). The lower doses of eculizumab allow for either subcutaneous or intravenous administration of eculizumab.

[0712] In the combination therapies of the present invention comprising eculizumab, eculizumab may be administered to the subject, e.g., subcutaneously, at a dose of about 0.01 mg/kg to about 10 mg/kg, or about 5 mg/kg to about 10 mg/kg, or about 0.5 mg/kg to about 15 mg/kg. For example, eculizumab may be administered to the subject, e.g., subcutaneously, at a dose of 0.5 mg/kg, 1 mg/kg, 1.5 mg/kg, 2 mg/kg, 2.5 mg/kg, 3 mg/kg, 3.5 mg/kg, 4 mg/kg, 4.5 mg/kg, 5 mg/kg, 5.5 mg/kg, 6 mg/kg, 6.5 mg/kg. 7 mg/kg, 7.5 mg/kg, 8 mg/kg, 8.5 mg/kg, 9 mg/kg, 9.5 mg/kg, 10 mg/kg, 10.5 mg/kg, 11 mg/kg, 11.5 mg/kg, 12 mg/kg, 12.5 mg/kg, 13 mg/kg, 13.5 mg/kg, 14 mg/kg, 14.5 mg/kg, or15 mg/kg.

[0713] The methods and uses of the invention include administering a composition described herein such that expression of the target C3 (and/or C5) gene is decreased, such as for about 1, 2, 3, 4, 5, 6, 7, 8, 12, 16, 18, 24, 28, 32, 36, 40, 44, 48, 52, 56, 60, 64, 68, 72, 76, or about 80 hours. In one embodiment, expression of the target gene is decreased for an extended duration, e.g., at least about two, three, four, five, six, seven days or more, e.g., about one week, two weeks, three weeks, or about four weeks or longer.

### VIII. Kits

[0714] In certain aspects, the instant disclosure provides kits that include a suitable container containing a pharmaceutical formulation of a siRNA compound, e.g., a double-stranded siRNA compound, or siRNA compound, (e.g., a precursor, e.g., a larger siRNA compound which can be processed into a siRNA compound, or a DNA which encodes an siRNA compound, e.g., a double-stranded siRNA compound, or ssiRNA compound, or precursor thereof).

[0715] Such kits include one or more dsRNA agent(s) and instructions for use, e.g., instructions for administering a prophylactically or therapeutically effective amount of a dsRNA agent(s). The dsRNA agent may be in a vial or a pre-filled syringe. The kits may optionally further comprise means for administering the dsRNA agent (e.g., an injection device, such as a pre-filled syringe), or means for measuring the inhibition of C3 (e.g., means for measuring the inhibition of C3 mRNA, C3 protein, and/or C3 activity). Such means for measuring the inhibition of C3 may comprise a means for obtaining a sample from a subject, such as, e.g., a plasma sample. The kits of the invention may optionally further comprise means for determining the therapeutically effective or prophylactically effective amount.

[0716] In certain embodiments the individual components of the pharmaceutical formulation may be provided in one container, e.g., a vial or a pre-filled syringe. Alternatively, it may be desirable to provide the components of the pharmaceutical formulation separately in two or more containers, e.g., one container for a siRNA compound preparation, and at least another for a carrier compound. The kit may be packaged in a number of different configurations such as one or more containers in a single box. The different components can be combined, e.g., according to instructions provided with the kit. The components can be combined according to a method described herein, e.g., to prepare and administer a pharmaceutical composition. The kit can also include a delivery device.

[0717] This invention is further illustrated by the following examples which should not be construed as limiting. The entire contents of all references, patents and published patent applications cited throughout this application, as well as the informal Sequence Listing and Figures, are hereby incorporated herein by reference.

### EXAMPLES

### Example 1. IRNA Synthesis

### Source of Reagents

[0718] Where the source of a reagent is not specifically given herein, such reagent can be obtained from any supplier of reagents for molecular biology at a quality/purity standard for application in molecular biology.

siRNA Design

[0719] siRNAs targeting the huma complement component C3 (C3) gene (human: NCBI refseqID NM_000064.3; NCBI GeneID: 718) were designed using custom R and Python scripts. The human NM_000064.3 REFSEQ mRNA, has a length of 5148 bases.

[0720] Detailed lists of the unmodified C3 sense and antisense strand nucleotide sequences are shown in Tables 2 and 4. Detailed lists of the modified C3 sense and antisense strand nucleotide sequences are shown in Tables 3 and 5.

[0721] It is to be understood that, throughout the application, a duplex name without a decimal is equivalent to a duplex name with a decimal which merely references the batch number of the duplex. For example, AD-959917 is equivalent to AD-959917.1.

siRNA Synthesis

[0722] siRNAs were designed, synthesized, and prepared using methods known in the art.

[0723] Briefly, siRNA sequences were synthesized on a 1 μmol scale using a Mermade 192 synthesizer (BioAutomation) with phosphoramidite chemistry on solid supports. The solid support was controlled pore glass (500-1000 Å) loaded with a custom GalNAc ligand (3′-GalNAc conjugates), universal solid support (AM Chemicals), or the first nucleotide of interest. Ancillary synthesis reagents and standard 2-cyanoethyl phosphoramidite monomers (2′-deoxy-2′-fluoro, 2′-O-methyl, RNA, DNA) were obtained from Thermo-Fisher (Milwaukee, WI), Hongene (China), or Chemgenes (Wilmington, MA, USA). Additional phosphoramidite monomers were procured from commercial suppliers, prepared in-house, or procured using custom synthesis from various CMOs. Phosphoramidites were prepared at a concentration of 100 mM in either acetonitrile or 9:1 acetonitrile: DMF and were coupled using 5-Ethylthio-1H-tetrazole (ETT, 0.25 M in acetonitrile) with a reaction time of 400 s. Phosphorothioate linkages were generated using a 100 mM solution of 3-((Dimethylamino-methylidene) amino)-3H-1,2,4-dithiazole-3-thione (DDTT, obtained from Chemgenes (Wilmington, MA, USA)) in anhydrous acetonitrile/pyridine (9:1 v/v). Oxidation time was 5 minutes. All sequences were synthesized with final removal of the DMT group (“DMT-Off”).

[0724] Upon completion of the solid phase synthesis, solid-supported oligoribonucleotides were treated with 300 μL of Methylamine (40% aqueous) at room temperature in 96 well plates for approximately 2 hours to afford cleavage from the solid support and subsequent removal of all additional base-labile protecting groups. For sequences containing any natural ribonucleotide linkages (2′-OH) protected with a tert-butyl dimethyl silyl (TBDMS) group, a second deprotection step was performed using TEA.3HF (triethylamine trihydrofluoride). To each oligonucleotide solution in aqueous methylamine was added 200 μL of dimethyl sulfoxide (DMSO) and 300 μL TEA.3HF and the solution was incubated for approximately 30 mins at 60° C. After incubation, the plate was allowed to come to room temperature and crude oligonucleotides were precipitated by the addition of 1 mL of 9:1 acetontrile: ethanol or 1:1 ethanol: isopropanol. The plates were then centrifuged at 4° C. for 45 mins and the supernatant carefully decanted with the aid of a multichannel pipette. The oligonucleotide pellet was resuspended in 20 mM NaOAc and subsequently desalted using a HiTrap size exclusion column (5 mL, GE Healthcare) on an Agilent LC system equipped with an autosampler, UV detector, conductivity meter, and fraction collector. Desalted samples were collected in 96 well plates and then analyzed by LC-MS and UV spectrometry to confirm identity and quantify the amount of material, respectively.

[0725] Duplexing of single strands was performed on a Tecan liquid handling robot. Sense and antisense single strands were combined in an equimolar ratio to a final concentration of 10 μM in 1×PBS in 96 well plates, the plate sealed, incubated at 100° C. for 10 minutes, and subsequently allowed to return slowly to room temperature over a period of 2-3 hours. The concentration and identity of each duplex was confirmed and then subsequently utilized for in vitro screening assays.

### Example 2. In Vitro Screening Methods

### Cell Culture and 384-Well Transfections

[0726] Hep3b cells (ATCC, Manassas, VA) were grown to near confluence at 37° C. in an atmosphere of 5% CO₂ in Eagle's Minimum Essential Medium (Gibco) supplemented with 10% FBS (ATCC) before being released from the plate by trypsinization. Transfection was carried out by adding 7.5 μl of Opti-MEM plus 0.1 μl of Lipofectamine RNAiMax per well (Invitrogen, Carlsbad CA. cat #13778-150) to 2.5 μl of each siRNA duplex to an individual well in a 384-well plate. The mixture was then incubated at room temperature for 15 minutes. Forty μl of complete growth media without antibiotic containing ˜1.5×10⁴ cells were then added to the siRNA mixture. Cells were incubated for 24 hours prior to RNA purification. Single dose experiments were performed at 10 nM, 1 nM, and 0.1 nM final duplex concentration.

Total RNA Isolation Using DYNABEADS mRNA Isolation Kit (Invitrogen™, Part #: 610-12)

[0727] Cells were lysed in 75 μl of Lysis/Binding Buffer containing 3 μL of beads per well and mixed for 10 minutes on an electrostatic shaker. The washing steps were automated on a Biotek EL406, using a magnetic plate support. Beads were washed (in 90 μL) once in Buffer A, once in Buffer B, and twice in Buffer E, with aspiration steps in between. Following a final aspiration, complete 10 μL RT mixture was added to each well, as described below.

cDNA Synthesis Using ABI High Capacity cDNA Reverse Transcription Kit (Applied Biosystems, Foster City, CA, Cat #4368813)

[0728] A master mix of 1 μl 10× Buffer, 0.4 μl 25× dNTPs, 1 μl Random primers, 0.5 μl Reverse Transcriptase, 0.5 μl RNase inhibitor and 6.6 μl of H₂O per reaction were added per well. Plates were sealed, agitated for 10 minutes on an electrostatic shaker, and then incubated at 37 degrees C. for 2 hours. Following this, the plates were agitated at 80 degrees C. for 8 minutes.

### Real Time PCR

[0729] Two microlitre (μl) of cDNA were added to a master mix containing 0.5 μl of human GAPDH TaqMan Probe (4326317E), 0.5 μl huma C3, 2 μl nuclease-free water and 5 μl Lightcycler 480 probe master mix (Roche Cat #04887301001) per well in a 384 well plates (Roche cat #04887301001). Real time PCR was done in a LightCycler480 Real Time PCR system (Roche).

[0730] To calculate relative fold change, data were analyzed using the ΔΔCt method and normalized to assays performed with cells transfected with 10 nM AD-1955, or mock transfected cells. IC₅₀s were calculated using a 4 parameter fit model using XLFit and normalized to cells transfected with AD-1955 or mock-transfected. The sense and antisense sequences of AD-1955 are: sense: cuuAcGcuGAGuAcuucGAdTsdT (SEQ ID NO:913) and antisense UCGAAGuACUcAGCGuAAGdTsdT (SEq ID NO:914).

[0731] The results of the screening of the dsRNA agents listed in Tables 2 and 3 in Hep3B cells are shown in Table 6.

TABLE 1
Abbreviations of nucleotide monomers used in nucleic acid sequence representation. It will
be understood that these monomers, when present in an oligonucleotide, are mutually linked by 5′-3′-
phosphodiester bonds; and it is understood that when the nucleotide contains a 2′-fluoro modification,
then the fluoro replaces the hydroxy at that position in the parent nucleotide (i.e., it is a 2′-deoxy-2′-
fluoronucleotide). It is to be further understood that the nucleotide abbreviations in the table omit the
3′-phosphate (i.e., they are 3′-OH) when placed at the 3′-terminal position of an oligonucleotide.

| Abbreviation | Nucleotide(s) |
|---|---|
| A | Adenosine-3′-phosphate |
| Ab | beta-L-adenosine-3′-phosphate |
| Abs | beta-L-adenosine-3′-phosphorothioate |
| Af | 2′-fluoroadenosine-3′-phosphate |
| Afs | 2′-fluoroadenosine-3′-phosphorothioate |
| As | adenosine-3′-phosphorothioate |
| C | cytidine-3′-phosphate |
| Cb | beta-L-cytidine-3′-phosphate |
| Cbs | beta-L-cytidine-3′-phosphorothioate |
| Cf | 2′-fluorocytidine-3′-phosphate |
| Cfs | 2′-fluorocytidine-3′-phosphorothioate |
| Cs | cytidine-3′-phosphorothioate |
| G | guanosine-3′-phosphate |
| Gb | beta-L-guanosine-3′-phosphate |
| Gbs | beta-L-guanosine-3′-phosphorothioate |
| Gf | 2′-fluoroguanosine-3′-phosphate |
| Gfs | 2′-fluoroguanosine-3′-phosphorothioate |
| Gs | guanosine-3′-phosphorothioate |
| T | 5′-methyluridine-3′-phosphate |
| Tf | 2′-fluoro-5-methyluridine-3′-phosphate |
| Tfs | 2′-fluoro-5-methyluridine-3′-phosphorothioate |
| Ts | 5-methyluridine-3′-phosphorothioate |
| U | Uridine-3′-phosphate |
| Uf | 2′-fluorouridine-3′-phosphate |
| Ufs | 2′-fluorouridine-3′-phosphorothioate |
| Us | uridine-3′-phosphorothioate |
| N | any nucleotide, modified or unmodified |
| a | 2′-O-methyladenosine-3′-phosphate |
| as | 2′-O-methyladenosine-3′-phosphorothioate |
| C | 2′-O-methylcytidine-3′-phosphate |
| CS | 2′-O-methylcytidine-3′-phosphorothioate |
| g | 2′-O-methylguanosine-3′-phosphate |
| gs | 2′-O-methylguanosine-3′-phosphorothioate |
| t | 2′-O-methyl-5-methyluridine-3′-phosphate |
| ts | 2′-O-methyl-5-methyluridine-3′-phosphorothioate |
| u | 2′-O-methyluridine-3′-phosphate |
| us | 2′-O-methyluridine-3′-phosphorothioate |
| S | phosphorothioate linkage |
| L10 | N-(cholesterylcarboxamidocaproyl)-4-hydroxyprolinol (Hyp-C6-Chol) |
| | [chemical structure] |
| L96 | N-[tris(GalNAc-alkyl)-amidodecanoyl)]-4-hydroxyprolinol |
| | (Hyp-(GalNAc-alkyl)3) |
| | (2S,4R)-1-[29-[[2-(acetylamino)-2-deoxy-β-D-galactopyranosyl]oxy]-14,14- |
| | bis[[3-[[3-[[5-[[2-(acetylamino)-2-deoxy-β-D-galactopyranosyl]oxy]-1- |
| | oxopentyl]amino]propyl]amino]-3-oxopropoxy]methyl]-1,12,19,25-tetraoxo-16- |
| | oxa-13,20,24-triazanonacos-1-yl]-4-hydroxy-2-hydroxymethylpyrrolidine |
| | [chemical structure] |
| uL96 | 2′-O-methyluridine-3′-phosphate ((25,4R)-1-[29-[2-(acetylamino)-2-deoxy-β-D- |
| | galactopyranosyl]oxy]-14,14-bis[[3-[[3-[[5-[[2-(acetylamino)-2-deoxy-β-D- |
| | galactopyranosyl]oxy]-1-oxopentyl]amino]propyl]amino]-3- |
| | oxopropoxy]methyl]-1,12,19,25-tetraoxo-16-oxa-13,20,24-triazanonacos-1-yl]- |
| | 4-hydroxy-2-pyrrolidinyl)methyl ester |
| | [chemical structure] |
| Y34 | 2-hydroxymethyl-tetrahydrofurane-4-methoxy-3-phosphate (abasic 2′-OMe |
| | furanose) |
| | [chemical structure] |
| Y44 | inverted abasic DNA (2-hydroxymethyl-tetrahydrofurane-5-phosphate) |
| | [chemical structure] |
| (Agn) | Adenosine-glycol nucleic acid (GNA) S-Isomer |
| (Cgn) | Cytidine-glycol nucleic acid (GNA) S-Isomer |
| (Ggn) | Guanosine-glycol nucleic acid (GNA) S-Isomer |
| (Tgn) | Thymidine-glycol nucleic acid (GNA) S-Isomer |
| P | Phosphate |
| VP | Vinyl-phosphonate |
| dA | 2′-deoxyadenosine-3′-phosphate |
| dAs | 2′-deoxyadenosine-3′-phosphorothioate |
| dC | 2′-deoxycytidine-3′-phosphate |
| dCs | 2′-deoxycytidine-3′-phosphorothioate |
| dG | 2′-deoxyguanosine-3′-phosphate |
| dGs | 2′-deoxyguanosine-3′-phosphorothioate |
| dT | 2′-deoxythimidine-3`-phosphate |
| dTs | 2′-deoxythimidine-3′-phosphorothioate |
| dU | 2′-deoxyuridine |
| dUs | 2′-deoxyuridine-3′-phosphorothioate |
| (C2p) | cytidine-2′-phosphate |
| (G2p) | guanosine-2′-phosphate |
| (U2p) | uridine-2′-phosphate |
| (A2p) | adenosine-2′-phosphate |
| (Chd) | 2′-O-hexadecyl-cytidine-3′-phosphate |
| (Ahd) | 2′-O-hexadecyl-adenosine-3′-phosphate |
| (Ghd) | 2′-O-hexadecyl-guanosine-3′-phosphate |
| (Uhd) | 2′-O-hexadecyl-uridine-3′-phosphate |

TABLE 2
Unmodified Sense and Antisense Strand Sequences of Complement component C3 (C3) dsRNA Agents

| | | SEQ | Range in | | SEQ | Range in |
|---|---|---|---|---|---|---|
| | Sense Sequence | ID | NM_ | Antisense Sequence | ID | NM_ |
| Duplex Name | 5′ to 3′ | NO: | 000064.3 | 5′ to 3′ | NO: | 000064.3 |
| AD-1479283.1 | CCGAGCCGUUCUCUACAAUUU | 1 | 2634-2654 | AAAUTGTAGAGAACGGCUCGGAU | 361 | 2632-2654 |
| AD-1479284.1 | CCGAGCCGUUCUCUACAAUUA | 2 | 2634-2654 | UAAUTGTAGAGAACGGCUCGGAU | 362 | 2632-2654 |
| AD-1479285.1 | CCGAGCCGUUCUCUACAAUUU | 3 | 2634-2654 | AAAUTGTAGAGAACGGCUCGGGU | 363 | 2632-2654 |
| AD-1479286.1 | GAGCCGUUCUCUACAAUUU | 4 | 2636-2654 | AAAUTGTAGAGAACGGCUCGG | 364 | 2634-2654 |
| AD-1479287.1 | CCGACCCGUUCUCUACAAUUU | 5 | 2634-2654 | AAAUTGTAGAGAACGGGUCGGAU | 365 | 2632-2654 |
| AD-1479288.1 | CCGUGCCGUUCUCUACAAUUU | 6 | 2634-2654 | AAAUTGTAGAGAACGGCACGGAU | 366 | 2632-2654 |
| AD-1479289.1 | CCCAGCCGUUCUCUACAAUUU | 7 | 2634-2654 | AAAUTGTAGAGAACGGCUGGGAU | 367 | 2632-2654 |
| AD-1479290.1 | CCGACCCGUUCUCUACAAUUU | 8 | 2634-2654 | AAAUTGTAGAGAACGGGUCGGGU | 368 | 2632-2654 |
| AD-1479291.1 | CCGUGCCGUUCUCUACAAUUU | 9 | 2634-2654 | AAAUTGTAGAGAACGGCACGGGU | 369 | 2632-2654 |
| AD-1479292.1 | CCCAGCCGUUCUCUACAAUUU | 10 | 2634-2654 | AAAUTGTAGAGAACGGCUGGGGU | 370 | 2632-2654 |
| AD-1479293.1 | GACCCGUUCUCUACAAUUU | 11 | 2636-2654 | AAAUTGTAGAGAACGGGUCGG | 371 | 2634-2654 |
| AD-1479294.1 | GUGCCGUUCUCUACAAUUU | 12 | 2636-2654 | AAAUTGTAGAGAACGGCACGG | 372 | 2634-2654 |
| AD-1479295.1 | CAGCCGUUCUCUACAAUUU | 13 | 2636-2654 | AAAUTGTAGAGAACGGCUGGG | 373 | 2634-2654 |
| AD-1479296.1 | CCGAGCCGUUCUCUACAAUUU | 14 | 2634-2654 | AAAUTGUAGAGAACGGCUCGGAU | 374 | 2632-2654 |
| AD-1479297.1 | CGAGCCGUUCUCUACAAUUAU | 15 | 2635-2655 | ATAATUGUAGAGAACGGCUCGGA | 375 | 2633-2655 |
| AD-1479298.1 | CGAGCCGUUCUCUACAAUUAA | 16 | 2635-2655 | UTAATUGUAGAGAACGGCUCGGA | 376 | 2633-2655 |
| AD-1479299.1 | CGAGCCGUUCUCUACAAUUAU | 17 | 2635-2655 | ATAATUGUAGAGAACGGCUCGGG | 377 | 2633-2655 |
| AD-1479300.1 | AGCCGUUCUCUACAAUUAU | 18 | 2637-2655 | ATAATUGUAGAGAACGGCUCG | 378 | 2635-2655 |
| AD-1479301.1 | CGAGGCGUUCUCUACAAUUAU | 19 | 2635-2655 | ATAATUGUAGAGAACGCCUCGGA | 379 | 2633-2655 |
| AD-1479302.1 | CGACCCGUUCUCUACAAUUAU | 20 | 2635-2655 | ATAATUGUAGAGAACGGGUCGGA | 380 | 2633-2655 |
| AD-1479303.1 | CGUGCCGUUCUCUACAAUUAU | 21 | 2635-2655 | ATAATUGUAGAGAACGGCACGGA | 381 | 2633-2655 |
| AD-1479304.1 | CGAGGCGUUCUCUACAAUUAU | 22 | 2635-2655 | ATAATUGUAGAGAACGCCUCGGG | 382 | 2633-2655 |
| AD-1479305.1 | CGACCCGUUCUCUACAAUUAU | 23 | 2635-2655 | ATAATUGUAGAGAACGGGUCGGG | 383 | 2633-2655 |
| AD-1479306.1 | CGUGCCGUUCUCUACAAUUAU | 24 | 2635-2655 | ATAATUGUAGAGAACGGCACGGG | 384 | 2633-2655 |
| AD-1479307.1 | AGGCGUUCUCUACAAUUAU | 25 | 2637-2655 | ATAATUGUAGAGAACGCCUCG | 385 | 2635-2655 |
| AD-1479308.1 | ACCCGUUCUCUACAAUUAU | 26 | 2637-2655 | ATAATUGUAGAGAACGGGUCG | 386 | 2635-2655 |
| AD-1479309.1 | UGCCGUUCUCUACAAUUAU | 27 | 2637-2655 | ATAATUGUAGAGAACGGCACG | 387 | 2635-2655 |
| AD-1479310.1 | CGAGCCGUUCUCUACAAUUAU | 28 | 2635-2655 | ATAATUGUAGAGAACGGCUCGGA | 388 | 2633-2655 |
| AD-1479311.1 | GAGCCGUUCUCUACAAUUACU | 29 | 2636-2656 | AGUAAUTGUAGAGAACGGCUCGG | 389 | 2634-2656 |
| AD-1479312.1 | GAGCCGUUCUCUACAAUUACU | 30 | 2636-2656 | AGUAAUUGUAGAGAACGGCUCGG | 390 | 2634-2656 |
| AD-1479313.1 | GAGCCGUUCUCUACAAUUACU | 31 | 2636-2656 | AGUAAUUGUAGAGAACGGCUCGG | 391 | 2634-2656 |
| AD-1479314.1 | GAGCCGUUCUCUACAAUUACU | 32 | 2636-2656 | AGUAAUUGUAGAGAACGGCUCGG | 392 | 2634-2656 |
| AD-1479315.1 | GAGCCGUUCUCUACAAUUACU | 33 | 2636-2656 | AGUAAUUGUAGAGAACGGCUCGG | 393 | 2634-2656 |
| AD-1479316.1 | GAGCCGUUCUCUACAAUUACU | 34 | 2636-2656 | AGUAAUUGUAGAGAACGGCUCGG | 394 | 2634-2656 |
| AD-1479317.1 | GAGCCGUUCUCUACAAUUACU | 35 | 2636-2656 | AGUAAUUGUAGAGAACGGCUCGG | 395 | 2634-2656 |
| AD-1479318.1 | GAGCCGUUCUCUACAAUUACU | 36 | 2636-2656 | AGUAAUUGUAGAGAACGGCUCGG | 396 | 2634-2656 |
| AD-1479319.1 | GAGCCGUUCUCUACAAUUACU | 37 | 2636-2656 | AGUAAUUGUAGAGAACGGCUCGG | 397 | 2634-2656 |
| AD-1479320.1 | GAGCCGUUCUCUACAAUUACU | 38 | 2636-2656 | AGUAAUUGUAGAGAACGGCUCGG | 398 | 2634-2656 |
| AD-1479321.1 | GAGCCGUUCUCUACAAUUACU | 39 | 2636-2656 | AGUAAUUGUAGAGAACGGCUCGG | 399 | 2634-2656 |
| AD-1479322.1 | GAGCCGUUCUCUACAUUUACU | 40 | 2636-2656 | AGUAAAUGUAGAGAACGGCUCGG | 400 | 2634-2656 |
| AD-1479323.1 | GAGCCGUUCUCUACUAUUACU | 41 | 2636-2656 | AGUAAUAGUAGAGAACGGCUCGG | 401 | 2634-2656 |
| AD-1479324.1 | GAGCCGUUCUCUAUAAUUACU | 42 | 2636-2656 | AGUAAUUAUAGAGAACGGCUCGG | 402 | 2634-2656 |
| AD-1479325.1 | GAGCCGUUGUCUACAAUUACU | 43 | 2636-2656 | AGUAAUUGUAGACAACGGCUCGG | 403 | 2634-2656 |
| AD-1479326.1 | GAGCCGUACUCUACAAUUACU | 44 | 2636-2656 | AGUAAUUGUAGAGUACGGCUCGG | 404 | 2634-2656 |
| AD-1479327.1 | GAGCCGAUCUCUACAAUUACU | 45 | 2636-2656 | AGUAAUUGUAGAGAUCGGCUCGG | 405 | 2634-2656 |
| AD-1479328.1 | GAGCCCUUCUCUACAAUUACU | 46 | 2636-2656 | AGUAAUUGUAGAGAAGGGCUCGG | 406 | 2634-2656 |
| AD-1479329.1 | GAGCCGUUCUCUACAAUUACU | 47 | 2636-2656 | AGUAAUTGUAGAGAACGGCUCGG | 407 | 2634-2656 |
| AD-1479330.1 | GAGCCGUUCUCUACAAUUACA | 48 | 2636-2656 | UGUAAUTGUAGAGAACGGCUCGG | 408 | 2634-2656 |
| AD-1479331.1 | GAGCGGUUCUCUACAAUUACU | 49 | 2636-2656 | AGUAAUTGUAGAGAACCGCUCGG | 409 | 2634-2656 |
| AD-1479332.1 | GAGGCGUUCUCUACAAUUACU | 50 | 2636-2656 | AGUAAUTGUAGAGAACGCCUCGG | 410 | 2634-2656 |
| AD-1479333.1 | GACCCGUUCUCUACAAUUACU | 51 | 2636-2656 | AGUAAUTGUAGAGAACGGGUCGG | 411 | 2634-2656 |
| AD-1479334.1 | GAGCCGUUCUCUACAAUUACU | 52 | 2636-2656 | AGUAAUTGUAGAGAACGGCUCGG | 412 | 2634-2656 |
| AD-1479335.1 | GAGCCGUUCUCUACAAUUACU | 53 | 2636-2656 | AGUAAUUGUAGAGAACGGCUCGG | 413 | 2634-2656 |
| AD-1479336.1 | GAGCCGUUCUCUACAAUUACA | 54 | 2636-2656 | UGUAAUUGUAGAGAACGGCUCGG | 414 | 2634-2656 |
| AD-1479337.1 | GAGCCGUUCUCUACAAUUACU | 55 | 2636-2656 | AGUAAUTGUAGAGAACGGCUCGG | 415 | 2634-2656 |
| AD-1479338.1 | GAGCCGUUCUCUACAAUUACU | 56 | 2636-2656 | AGUAAUTGUAGAGAACGGCUCGG | 416 | 2634-2656 |
| AD-1479339.1 | GAGCCGUUCUCUACAAUUACU | 57 | 2636-2656 | AGUAAUTGUAGAGAACGGCUCGG | 417 | 2634-2656 |
| AD-1479340.1 | GAGCCGUUCUCUACAAUUACU | 58 | 2636-2656 | AGUAAUTGUAGAGAACGGCUCGG | 418 | 2634-2656 |
| AD-1479341.1 | GAGAAAUUCUACUACAUCUAU | 59 | 811-831 | ATAGAUGUAGUAGAAUUUCUCUG | 419 | 809-831 |
| AD-1479342.1 | GAGAAAUUCUACUACAUCUAA | 60 | 811-831 | UTAGAUGUAGUAGAAUUUCUCUG | 420 | 809-831 |
| AD-1479343.1 | GAGAAAUUCUACUACAUCUAU | 61 | 811-831 | ATAGAUGUAGUAGAAUUUCUCCU | 421 | 809-831 |
| AD-1479344.1 | GAAAUUCUACUACAUCUAU | 62 | 813-831 | ATAGAUGUAGUAGAAUUUCUC | 422 | 811-831 |
| AD-1479345.1 | GAGAUAUUCUACUACAUCUAU | 63 | 811-831 | ATAGAUGUAGUAGAAUAUCUCUG | 423 | 809-831 |
| AD-1479346.1 | GAGUAAUUCUACUACAUCUAU | 64 | 811-831 | ATAGAUGUAGUAGAAUUACUCUG | 424 | 809-831 |
| AD-1479347.1 | GACAAAUUCUACUACAUCUAU | 65 | 811-831 | ATAGAUGUAGUAGAAUUUGUCUG | 425 | 809-831 |
| AD-1479348.1 | GAGAAAUUCUACUACAUCUAU | 66 | 811-831 | ATAGAUAUAGUAGAAUUUCUCUG | 426 | 809-831 |
| AD-1479349.1 | GAGAAAUUCUACUACAUCUAU | 67 | 811-831 | ATAGAUGUAGUAGAAUUUCUCUG | 427 | 809-831 |
| AD-1479350.1 | AGAAAUUCUACUACAUCUAUU | 68 | 812-832 | AAUAGATGUAGTAGAAUUUCUCU | 428 | 810-832 |
| AD-1479351.1 | AGAAAUUCUACUACAUCUAUU | 69 | 812-832 | AAUAGATGUAGTAGAAUUUCUCU | 429 | 810-832 |
| AD-1479352.1 | AGAAAUUCUACUACAUCUAUA | 70 | 812-832 | UAUAGATGUAGTAGAAUUUCUCU | 430 | 810-832 |
| AD-1479353.1 | AGAAAUUCUACUACAUCUAUA | 71 | 812-832 | UAUAGATGUAGTAGAAUUUCUCU | 431 | 810-832 |
| AD-1479354.1 | AGAAAUUCUACUACAUCUAUU | 72 | 812-832 | AAUAGATGUAGTAGAAUUUCUGC | 432 | 810-832 |
| AD-1479355.1 | AGAAAUUCUACUACAUCUAUU | 73 | 812-832 | AAUAGATGUAGTAGAAUUUCUGC | 433 | 810-832 |
| AD-1479356.1 | AAAUUCUACUACAUCUAUU | 74 | 814-832 | AAUAGATGUAGTAGAAUUUCU | 434 | 812-832 |
| AD-1479357.1 | AAAUUCUACUACAUCUAUU | 75 | 814-832 | AAUAGATGUAGTAGAAUUUCU | 435 | 812-832 |
| AD-1479358.1 | AGAAUUUCUACUACAUCUAUU | 76 | 812-832 | AAUAGATGUAGTAGAAAUUCUCU | 436 | 810-832 |
| AD-1479359.1 | AGAUAUUCUACUACAUCUAUU | 77 | 812-832 | AAUAGATGUAGTAGAAUAUCUCU | 437 | 810-832 |
| AD-1479360.1 | AGUAAUUCUACUACAUCUAUU | 78 | 812-832 | AAUAGATGUAGTAGAAUUACUCU | 438 | 810-832 |
| AD-1479361.1 | AGAAUUUCUACUACAUCUAUU | 79 | 812-832 | AAUAGATGUAGTAGAAAUUCUCU | 439 | 810-832 |
| AD-1479362.1 | AGAUAUUCUACUACAUCUAUU | 80 | 812-832 | AAUAGATGUAGTAGAAUAUCUCU | 440 | 810-832 |
| AD-1479363.1 | AGUAAUUCUACUACAUCUAUU | 81 | 812-832 | AAUAGATGUAGTAGAAUUACUCU | 441 | 810-832 |
| AD-1479364.1 | AAUUUCUACUACAUCUAUU | 82 | 814-832 | AAUAGATGUAGTAGAAAUUCU | 442 | 812-832 |
| AD-1479365.1 | AUAUUCUACUACAUCUAUU | 83 | 814-832 | AAUAGATGUAGTAGAAUAUCU | 443 | 812-832 |
| AD-1479366.1 | UAAUUCUACUACAUCUAUU | 84 | 814-832 | AAUAGATGUAGTAGAAUUACU | 444 | 812-832 |
| AD-1479367.1 | AGAAAUUCUACUACAUCUAUU | 85 | 812-832 | AAUAGAUGUAGTAGAAUUUCUCU | 445 | 810-832 |
| AD-569268.7 | GAGAAAUUCUACUACAUCUAU | 86 | 811-831 | AUAGAUGUAGUAGAAUUUCUCUG | 446 | 809-831 |
| AD-569269.4 | AGAAAUUCUACUACAUCUAUU | 87 | 812-832 | AAUAGAUGUAGUAGAAUUUCUCU | 447 | 810-832 |
| AD-570712.4 | CCGAGCCGUUCUCUACAAUUU | 88 | 2634-2654 | AAAUUGUAGAGAACGGCUCGGAU | 448 | 2632-2654 |
| AD-570713.4 | CGAGCCGUUCUCUACAAUUAU | 89 | 2635-2655 | AUAAUUGUAGAGAACGGCUCGGA | 449 | 2633-2655 |
| AD-570714.10 | GAGCCGUUCUCUACAAUUACU | 90 | 2636-2656 | AGUAAUUGUAGAGAACGGCUCGG | 450 | 2634-2656 |

TABLE 3
Modified Sense and Antisense Strand Sequences of Complement component C3 (C3) dsRNA Agents

| | | SEQ | | SEQ | | SEQ |
|---|---|---|---|---|---|---|
| | | ID | | ID | | ID |
| Duplex Name | Sense Sequence 5′ to 3′ | NO: | Antisense Sequence 5′ to 3′ | NO: | mRNA target sequence 5′ to 3′ | NO: |
| AD-1479283.1 | cscsgagccgUfUfCfucuacaauuuL96 | 91 | asdAsaudTgdTagagdAaCfggcucggsasu | 451 | AUCCGAGCCGUUCUCUACAAUUA | 541 |
| AD-1479284.1 | cscsgagccgUfUfCfucuacaauuaL96 | 92 | usdAsaudTgdTagagdAaCfggcucggsasu | 452 | AUCCGAGCCGUUCUCUACAAUUA | 542 |
| AD-1479285.1 | cscsgagccgUfUfCfucuacaauuuL96 | 93 | asdAsaudTgdTagagdAaCfggcucggsgsu | 453 | AUCCGAGCCGUUCUCUACAAUUA | 543 |
| AD-1479286.1 | gsasgccgUfUfCfucuacaauuuL96 | 94 | asdAsaudTgdTagagdAaCfggcucsgsg | 454 | CCGAGCCGUUCUCUACAAUUA | 544 |
| AD-1479287.1 | cscsgacccgUfUfCfucuacaauuuL96 | 95 | asdAsaudTgdTagagdAaCfgggucggsasu | 455 | AUCCGAGCCGUUCUCUACAAUUA | 545 |
| AD-1479288.1 | cscsgugccgUfUfCfucuacaauuuL96 | 96 | asdAsaudTgdTagagdAaCfggcacggsasu | 456 | AUCCGAGCCGUUCUCUACAAUUA | 546 |
| AD-1479289.1 | cscscagccgUfUfCfucuacaauuuL96 | 97 | asdAsaudTgdTagagdAaCfggcugggsasu | 457 | AUCCGAGCCGUUCUCUACAAUUA | 547 |
| AD-1479290.1 | cscsgacccgUfUfCfucuacaauuuL96 | 98 | asdAsaudTgdTagagdAaCfgggucggsgsu | 458 | AUCCGAGCCGUUCUCUACAAUUA | 548 |
| AD-1479291.1 | cscsgugccgUfUfCfucuacaauuuL96 | 99 | asdAsaudTgdTagagdAaCfggcacggsgsu | 459 | AUCCGAGCCGUUCUCUACAAUUA | 549 |
| AD-1479292.1 | cscscagccgUfUfCfucuacaauuuL96 | 100 | asdAsaudTgdTagagdAaCfggcugggsgsu | 460 | AUCCGAGCCGUUCUCUACAAUUA | 550 |
| AD-1479293.1 | gsascccgUfUfCfucuacaauuuL96 | 101 | asdAsaudTgdTagagdAaCfgggucsgsg | 461 | CCGAGCCGUUCUCUACAAUUA | 551 |
| AD-1479294.1 | gsusgccgUfUfCfucuacaauuuL96 | 102 | asdAsaudTgdTagagdAaCfggcacsgsg | 462 | CCGAGCCGUUCUCUACAAUUA | 552 |
| AD-1479295.1 | csasgccgUfUfCfucuacaauuuL96 | 103 | asdAsaudTgdTagagdAaCfggcugsgsg | 463 | CCGAGCCGUUCUCUACAAUUA | 553 |
| AD-1479296.1 | cscsgagccgUfUfCfucuacaauuuL96 | 104 | asdAsaudTg(U2p)agagdAaCfgGfcucggsasu | 464 | AUCCGAGCCGUUCUCUACAAUUA | 554 |
| AD-1479297.1 | csgsagccguUfCfUfcuacaauuauL96 | 105 | asdTsaadTudGuagadGaAfcggcucgsgsa | 465 | UCCGAGCCGUUCUCUACAAUUAC | 555 |
| AD-1479298.1 | csgsagccguUfCfUfcuacaauuaaL96 | 106 | usdTsaadTudGuagadGaAfcggcucgsgsa | 466 | UCCGAGCCGUUCUCUACAAUUAC | 556 |
| AD-1479299.1 | csgsagccguUfCfUfcuacaauuauL96 | 107 | asdTsaadTudGuagadGaAfcggcucgsgsg | 467 | UCCGAGCCGUUCUCUACAAUUAC | 557 |
| AD-1479300.1 | asgsccguUfCfUfcuacaauuauL96 | 108 | asdTsaadTudGuagadGaAfcggcuscsg | 468 | CGAGCCGUUCUCUACAAUUAC | 558 |
| AD-1479301.1 | csgsaggcguUfCfUfcuacaauuauL96 | 109 | asdTsaadTudGuagadGaAfcgccucgsgsa | 469 | UCCGAGCCGUUCUCUACAAUUAC | 559 |
| AD-1479302.1 | csgsacccguUfCfUfcuacaauuauL96 | 110 | asdTsaadTudGuagadGaAfcgggucgsgsa | 470 | UCCGAGCCGUUCUCUACAAUUAC | 560 |
| AD-1479303.1 | csgsugccguUfCfUfcuacaauuauL96 | 111 | asdTsaadTudGuagadGaAfcggcacgsgsa | 471 | UCCGAGCCGUUCUCUACAAUUAC | 561 |
| AD-1479304.1 | csgsaggcguUfCfUfcuacaauuauL96 | 112 | asdTsaadTudGuagadGaAfcgccucgsgsg | 472 | UCCGAGCCGUUCUCUACAAUUAC | 562 |
| AD-1479305.1 | csgsacccguUfCfUfcuacaauuauL96 | 113 | asdTsaadTudGuagadGaAfcgggucgsgsg | 473 | UCCGAGCCGUUCUCUACAAUUAC | 563 |
| AD-1479306.1 | csgsugccguUfCfUfcuacaauuauL96 | 114 | asdTsaadTudGuagadGaAfcggcacgsgsg | 474 | UCCGAGCCGUUCUCUACAAUUAC | 564 |
| AD-1479307.1 | asgsgcguUfCfUfcuacaauuauL96 | 115 | asdTsaadTudGuagadGaAfcgccuscsg | 475 | CGAGCCGUUCUCUACAAUUAC | 565 |
| AD-1479308.1 | ascsccguUfCfUfcuacaauuauL96 | 116 | asdTsaadTudGuagadGaAfcggguscsg | 476 | CGAGCCGUUCUCUACAAUUAC | 566 |
| AD-1479309.1 | usgsccguUfCfUfcuacaauuauL96 | 117 | asdTsaadTudGuagadGaAfcggcascsg | 477 | CGAGCCGUUCUCUACAAUUAC | 567 |
| AD-1479310.1 | csgsagccguUfCfUfcuacaauuauL96 | 118 | asdTsaadTu(G2p)uagadGaAfcGfgcucgsgsa | 478 | UCCGAGCCGUUCUCUACAAUUAC | 568 |
| AD-1479311.1 | gsasgccgUfuCfUfCfuacaauuacuL96 | 119 | asGfsuadAu(Tgn)guagagAfaCfggcucsgsg | 479 | CCGAGCCGUUCUCUACAAUUACC | 569 |
| AD-1479312.1 | gsasgccgUfuCfUfCfuacaauuacuL96 | 120 | asGfsuadAu(U2p)guagagAfaCfggcucsgsg | 480 | CCGAGCCGUUCUCUACAAUUACC | 570 |
| AD-1479313.1 | gsasgccgUfuCfUfCfuacaauuacuL96 | 121 | asGfsuaaUfu(G2p)UfagagAfaCfggcucsgsg | 481 | CCGAGCCGUUCUCUACAAUUACC | 571 |
| AD-1479314.1 | gsasgccgUfuCfUfCfuacaauuacuL96 | 122 | asGfsuaaUfuGf(U2p)agagAfaCfggcucsgsg | 482 | CCGAGCCGUUCUCUACAAUUACC | 572 |
| AD-1479315.1 | gsasgccgUfuCfUfCfuacaauuacuL96 | 123 | asGfsuaaUfuGfUf(A2p)gagAfaCfggcucsgsg | 483 | CCGAGCCGUUCUCUACAAUUACC | 573 |
| AD-1479316.1 | gsasgccgUfuCfUfCfuacaauuacuL96 | 124 | asGfsuaaUfuGfUfa(G2p)agAfaCfggcucsgsg | 484 | CCGAGCCGUUCUCUACAAUUACC | 574 |
| AD-1479317.1 | gsasgccgUfuCfUfCfuacaauuacuL96 | 125 | asGfsuaaUfuGfUfag(A2p)gAfaCfggcucsgsg | 485 | CCGAGCCGUUCUCUACAAUUACC | 575 |
| AD-1479318.1 | gsasgccgUfuCfUfCfuacaauuacuL96 | 126 | asGfsuaaUfuGfUfaga(G2p)AfaCfggcucsgsg | 486 | CCGAGCCGUUCUCUACAAUUACC | 576 |
| AD-1479319.1 | gsasgccgUfuCfUfCfuacaauuacuL96 | 127 | asGfsuaaUfuGfUfagag(A2p)aCfggcucsgsg | 487 | CCGAGCCGUUCUCUACAAUUACC | 577 |
| AD-1479320.1 | gsasgccgUfuCfUfCfuacaauuacuL96 | 128 | asGfsuaaUfuGfUfagagAf(A2p)Cfggcucsgsg | 488 | CCGAGCCGUUCUCUACAAUUACC | 578 |
| AD-1479321.1 | gsasgccgUfuCfUfCfuacaauuacuL96 | 129 | asGfsuaaUfuGfUfagagAfa(C2p)ggcucsgsg | 489 | CCGAGCCGUUCUCUACAAUUACC | 579 |
| AD-1479322.1 | gsasgccgUfuCfUfCfuacauuuacuL96 | 130 | asGfsuaaAfuGfUfagagAfaCfggcucsgsg | 490 | CCGAGCCGUUCUCUACAAUUACC | 580 |
| AD-1479323.1 | gsasgccgUfuCfUfCfuacuauuacuL96 | 131 | asGfsuaaUfaGfUfagagAfaCfggcucsgsg | 491 | CCGAGCCGUUCUCUACAAUUACC | 581 |
| AD-1479324.1 | gsasgccgUfuCfUfCfuauaauuacuL96 | 132 | asGfsuaaUfuAfUfagagAfaCfggcucsgsg | 492 | CCGAGCCGUUCUCUACAAUUACC | 582 |
| AD-1479325.1 | gsasgccgUfuGfUfCfuacaauuacuL96 | 133 | asGfsuaaUfuGfUfagacAfaCfggcucsgsg | 493 | CCGAGCCGUUCUCUACAAUUACC | 583 |
| AD-1479326.1 | gsasgccgUfaCfUfCfuacaauuacuL96 | 134 | asGfsuaaUfuGfUfagagUfaCfggcucsgsg | 494 | CCGAGCCGUUCUCUACAAUUACC | 584 |
| AD-1479327.1 | gsasgccgAfuCfUfCfuacaauuacuL96 | 135 | asGfsuaaUfuGfUfagagAfuCfggcucsgsg | 495 | CCGAGCCGUUCUCUACAAUUACC | 585 |
| AD-1479328.1 | gsasgcccUfuCfUfCfuacaauuacuL96 | 136 | asGfsuaaUfuGfUfagagAfaGfggcucsgsg | 496 | CCGAGCCGUUCUCUACAAUUACC | 586 |
| AD-1479329.1 | gsasgccguuCfUfCfuacaauuacuL96 | 137 | asdGsuadAudTguagdAgAfacggcucsgsg | 497 | CCGAGCCGUUCUCUACAAUUACC | 587 |
| AD-1479330.1 | gsasgccguuCfUfCfuacaauuacaL96 | 138 | usdGsuadAudTguagdAgAfacggcucsgsg | 498 | CCGAGCCGUUCUCUACAAUUACC | 588 |
| AD-1479331.1 | gsasgcgguuCfUfCfuacaauuacuL96 | 139 | asdGsuadAudTguagdAgAfaccgcucsgsg | 499 | CCGAGCCGUUCUCUACAAUUACC | 589 |
| AD-1479332.1 | gsasggcguuCfUfCfuacaauuacuL96 | 140 | asdGsuadAudTguagdAgAfacgccucsgsg | 500 | CCGAGCCGUUCUCUACAAUUACC | 590 |
| AD-1479333.1 | gsascccguuCfUfCfuacaauuacuL96 | 141 | asdGsuadAudTguagdAgAfacgggucsgsg | 501 | CCGAGCCGUUCUCUACAAUUACC | 591 |
| AD-1479334.1 | gsasgccguuCfUfCfuacaauuacuL96 | 142 | asdGsuadAu(Tgn)guagdAgAfacggcucsgsg | 502 | CCGAGCCGUUCUCUACAAUUACC | 592 |
| AD-1479335.1 | gsasgccguuCfUfCfuacaauuacuL96 | 143 | asdGsuadAu(U2p)guagdAgAfacggcucsgsg | 503 | CCGAGCCGUUCUCUACAAUUACC | 593 |
| AD-1479336.1 | gsasgccguuCfUfCfuacaauuacaL96 | 144 | usdGsuadAu(U2p)guagdAgAfacggcucsgsg | 504 | CCGAGCCGUUCUCUACAAUUACC | 594 |
| AD-1479337.1 | gsasgccguuCfUfCfuacaauuacuL96 | 145 | asdGsuadAudTguagdA(G2p)Afacggcucsgsg | 505 | CCGAGCCGUUCUCUACAAUUACC | 595 |
| AD-1479338.1 | gsasgccguuCfUfCfuacaauuacuL96 | 146 | asdGsuadAudTguagdAg(A2p)acggcucsgsg | 506 | CCGAGCCGUUCUCUACAAUUACC | 596 |
| AD-1479339.1 | gsasgccguuCfUfCfuacaauuacuL96 | 147 | asdGsuadAudTguagdAgAf(A2p)cggcucsgsg | 507 | CCGAGCCGUUCUCUACAAUUACC | 597 |
| AD-1479340.1 | gsasgccguuCfUfCfuacaauuacuL96 | 148 | asdGsuadAudTguagdAgAfa(C2p)ggcucsgsg | 508 | CCGAGCCGUUCUCUACAAUUACC | 598 |
| AD-1479341.1 | gsasgaaauuCfUfAfcuacaucuauL96 | 149 | asdTsagdAudGuagudAgAfauuucucsusg | 509 | CAGAGAAAUUCUACUACAUCUAU | 599 |
| AD-1479342.1 | gsasgaaauuCfUfAfcuacaucuaaL96 | 150 | usdTsagdAudGuagudAgAfauuucucsusg | 510 | CAGAGAAAUUCUACUACAUCUAU | 600 |
| AD-1479343.1 | gsasgaaauuCfUfAfcuacaucuauL96 | 151 | asdTsagdAudGuagudAgAfauuucucscsu | 511 | CAGAGAAAUUCUACUACAUCUAU | 601 |
| AD-1479344.1 | gsasaauuCfUfAfcuacaucuauL96 | 152 | asdTsagdAudGuagudAgAfauuucsusc | 512 | GAGAAAUUCUACUACAUCUAU | 602 |
| AD-1479345.1 | gsasgauauuCfUfAfcuacaucuauL96 | 153 | asdTsagdAudGuagudAgAfauaucucsusg | 513 | CAGAGAAAUUCUACUACAUCUAU | 603 |
| AD-1479346.1 | gsasguaauuCfUfAfcuacaucuauL96 | 154 | asdTsagdAudGuagudAgAfauuacucsusg | 514 | CAGAGAAAUUCUACUACAUCUAU | 604 |
| AD-1479347.1 | gsascaaauuCfUfAfcuacaucuauL96 | 155 | asdTsagdAudGuagudAgAfauuugucsusg | 515 | CAGAGAAAUUCUACUACAUCUAU | 605 |
| AD-1479348.1 | gsasgaaauuCfUfAfcuacaucuauL96 | 156 | asdTsagdAudAuagudAgAfauuucucsusg | 516 | CAGAGAAAUUCUACUACAUCUAU | 606 |
| AD-1479349.1 | gsasgaaauuCfUfAfcuacaucuauL96 | 157 | asdTsagdAu(G2p)uagudAgAfaUfuucucsusg | 517 | CAGAGAAAUUCUACUACAUCUAU | 607 |
| AD-1479350.1 | asgsaaauucUfAfCfuacaucuauuL96 | 158 | asdAsuadGadTguagdTaGfaauuucuscsu | 518 | AGAGAAAUUCUACUACAUCUAUA | 608 |
| AD-1479351.1 | asgsaaauucUfAfCfuacaucuauuL96 | 159 | asdAsuadGadTguagdTadGadAuuucuscsu | 519 | AGAGAAAUUCUACUACAUCUAUA | 609 |
| AD-1479352.1 | asgsaaauucUfAfCfuacaucuauaL96 | 160 | usdAsuadGadTguagdTaGfaauuucuscsu | 520 | AGAGAAAUUCUACUACAUCUAUA | 610 |
| AD-1479353.1 | asgsaaauucUfAfCfuacaucuauaL96 | 161 | usdAsuadGadTguagdTadGadAuuucuscsu | 521 | AGAGAAAUUCUACUACAUCUAUA | 611 |
| AD-1479354.1 | asgsaaauucUfAfCfuacaucuauuL96 | 162 | asdAsuadGadTguagdTaGfaauuucusgsc | 522 | AGAGAAAUUCUACUACAUCUAUA | 612 |
| AD-1479355.1 | asgsaaauucUfAfCfuacaucuauuL96 | 163 | asdAsuadGadTguagdTadGadAuuucusgsc | 523 | AGAGAAAUUCUACUACAUCUAUA | 613 |
| AD-1479356.1 | asasauucUfAfCfuacaucuauuL96 | 164 | asdAsuadGadTguagdTaGfaauuuscsu | 524 | AGAAAUUCUACUACAUCUAUA | 614 |
| AD-1479357.1 | asasauucUfAfCfuacaucuauuL96 | 165 | asdAsuadGadTguagdTadGadAuuuscsu | 525 | AGAAAUUCUACUACAUCUAUA | 615 |
| AD-1479358.1 | asgsaauuucUfAfCfuacaucuauuL96 | 166 | asdAsuadGadTguagdTaGfaaauucuscsu | 526 | AGAGAAAUUCUACUACAUCUAUA | 616 |
| AD-1479359.1 | asgsauauucUfAfCfuacaucuauuL96 | 167 | asdAsuadGadTguagdTaGfaauaucuscsu | 527 | AGAGAAAUUCUACUACAUCUAUA | 617 |
| AD-1479360.1 | asgsuaauucUfAfCfuacaucuauuL96 | 168 | asdAsuadGadTguagdTaGfaauuacuscsu | 528 | AGAGAAAUUCUACUACAUCUAUA | 618 |
| AD-1479361.1 | asgsaauuucUfAfCfuacaucuauuL96 | 169 | asdAsuadGadTguagdTadGadAauucuscsu | 529 | AGAGAAAUUCUACUACAUCUAUA | 619 |
| AD-1479362.1 | asgsauauucUfAfCfuacaucuauuL96 | 170 | asdAsuadGadTguagdTadGadAuaucuscsu | 530 | AGAGAAAUUCUACUACAUCUAUA | 620 |
| AD-1479363.1 | asgsuaauucUfAfCfuacaucuauuL96 | 171 | asdAsuadGadTguagdTadGadAuuacuscsu | 531 | AGAGAAAUUCUACUACAUCUAUA | 621 |
| AD-1479364.1 | asasuuucUfAfCfuacaucuauuL96 | 172 | asdAsuadGadTguagdTaGfaaauuscsu | 532 | AGAAAUUCUACUACAUCUAUA | 622 |
| AD-1479365.1 | asusauucUfAfCfuacaucuauuL96 | 173 | asdAsuadGadTguagdTaGfaauauscsu | 533 | AGAAAUUCUACUACAUCUAUA | 623 |
| AD-1479366.1 | usasauucUfAfCfuacaucuauuL96 | 174 | asdAsuadGadTguagdTaGfaauuascsu | 534 | AGAAAUUCUACUACAUCUAUA | 624 |
| AD-1479367.1 | asgsaaauucUfAfCfuacaucuauuL96 | 175 | asdAsuadGa(U2p)guagdTaGfaAfuuucuscsu | 535 | AGAGAAAUUCUACUACAUCUAUA | 625 |
| AD-569268.7 | gsasgaaaUfuCfUfAfcuacaucuauL96 | 176 | asUfsagaUfgUfAfguagAfaUfuucucsusg | 536 | CAGAGAAAUUCUACUACAUCUAU | 626 |
| AD-569269.4 | asgsaaauUfcUfAfCfuacaucuauuL96 | 177 | asAfsuagAfuGfUfaguaGfaAfuuucuscsu | 537 | AGAGAAAUUCUACUACAUCUAUA | 627 |
| AD-570712.4 | cscsgagcCfgUfUfCfucuacaauuuL96 | 178 | asAfsauuGfuAfGfagaaCfgGfcucggsasu | 538 | AUCCGAGCCGUUCUCUACAAUUA | 628 |
| AD-570713.4 | csgsagccGfuUfCfUfcuacaauuauL96 | 179 | asUfsaauUfgUfAfgagaAfcGfgcucgsgsa | 539 | UCCGAGCCGUUCUCUACAAUUAC | 629 |
| AD-570714.10 | gsasgccgUfuCfUfCfuacaauuacuL96 | 180 | asGfsuaaUfuGfUfagagAfaCfggcucsgsg | 540 | CCGAGCCGUUCUCUACAAUUACC | 630 |

TABLE 4
Unmodified Sense and Antisense Strand Sequences of Complement component C3 (C3) dsRNA Agents

| | | SEQ | Range in | | SEQ | Range in |
|---|---|---|---|---|---|---|
| | Sense Sequence | ID | NM_ | Antisense Sequence | ID | NM_ |
| Duplex Name | 5′ to 3′ | NO: | 000064.3 | 5′ to 3′ | NO: | 000064.3 |
| AD-1479283.2 | CCGAGCCGUUCUCUACAAUUU | 181 | 2634-2654 | AAAUTGTAGAGAACGGCUCGGAU | 631 | 2632-2654 |
| AD-1479341.2 | GAGAAAUUCUACUACAUCUAU | 182 | 811-831 | ATAGAUGUAGUAGAAUUUCUCUG | 632 | 809-831 |
| AD-1479350.2 | AGAAAUUCUACUACAUCUAUU | 183 | 812-832 | AAUAGATGUAGTAGAAUUUCUCU | 633 | 810-832 |
| AD-1531655.2 | AAAUGAGGGUUUCACAGUCAA | 184 | 4071-4091 | UUGACUGUGAAACCCUCAUUUUC | 634 | 4069-4091 |
| AD-1531656.2 | CUGGGAGGACCCUGGUAAGCA | 185 | 3750-3770 | UGCUUACCAGGGUCCUCCCAGCG | 635 | 3748-3770 |
| AD-1531657.2 | CUACCCUACUCUGUUGUUCGA | 186 | 2596-2616 | UCGAACAACAGAGUAGGGUAGCC | 636 | 2594-2616 |
| AD-1531658.2 | AUGUACCAUGCUAAGGCCAAA | 187 | 4132-4152 | UUUGGCCUUAGCAUGGUACAUUG | 637 | 4130-4152 |
| AD-1531659.2 | CUAGUGCUGUCCAGUGAGAAA | 188 | 292-312 | UUUCUCACUGGACAGCACUAGUU | 638 | 290-312 |
| AD-1531660.2 | ACCAGGAACUGAACCUUGAUA | 189 | 3959-3979 | UAUCAAGGUUCAGUUCCUGGUGG | 639 | 3957-3979 |
| AD-1531662.2 | CACCCUCAUCAUCUACCUGGA | 190 | 4419-4439 | UCCAGGUAGAUGAUGAGGGUGUU | 640 | 4417-4439 |
| AD-1531663.2 | AGAGCGGGUACCUCUUCAUCA | 191 | 470-490 | UGAUGAAGAGGUACCCGCUCUGC | 641 | 468-490 |
| AD-1531663.3 | AGAGCGGGUACCUCUUCAUCA | 192 | 470-490 | UGAUGAAGAGGUACCCGCUCUGC | 642 | 468-490 |
| AD-1531663.4 | AGAGCGGGUACCUCUUCAUCA | 193 | 470-490 | UGAUGAAGAGGUACCCGCUCUGC | 643 | 468-490 |
| AD-1531664.2 | GGAGGUUGUGCUGAGCCGGAA | 194 | 987-1007 | UUCCGGCUCAGCACAACCUCCCC | 644 | 985-1007 |
| AD-1531665.2 | ACAUGGGCCAGUGGAAGAUCA | 195 | 692-712 | UGAUCUUCCACUGGCCCAUGUUG | 645 | 690-712 |
| AD-1531666.2 | GUGGGAGAAGUUCGGCCUAGA | 196 | 3192-3212 | UCUAGGCCGAACUUCUCCCACUG | 646 | 3190-3212 |
| AD-1531668.2 | CCUUGUCUUCUCAGAACCAGA | 197 | 629-649 | UCUGGUUCUGAGAAGACAAGGAG | 647 | 627-649 |
| AD-1531669.2 | UGUACAAGACCCGACUGGUCA | 198 | 4724-4744 | UGACCAGUCGGGUCUUGUACACA | 648 | 4722-4744 |
| AD-1531671.2 | UACGUGCUGCCCAGUUUCGAA | 199 | 772-792 | UUCGAAACUGGGCAGCACGUACU | 649 | 770-792 |
| AD-1531672.2 | ACCAGGAUGCCACUAUGUCUA | 200 | 4277-4297 | UAGACAUAGUGGCAUCCUGGUCU | 650 | 4275-4297 |
| AD-1636688.1 | UUCGUGCUGAAUAAGAAGAAU | 201 | 1900-1920 | ATUCTUCUUAUTCAGCACGAACA | 651 | 1898-1920 |
| AD-1636689.1 | CAGAGAAAUUCUACUACAUCU | 202 | 809-829 | AGAUGUAGUAGAAUUUCUCUGUA | 652 | 807-829 |
| AD-1636690.1 | CUACUGCAGCUAAAAGACUUU | 203 | 3811-3831 | AAAGTCTUUUAGCUGCAGUAGGG | 653 | 3809-3831 |
| AD-1636691.1 | GAGAACCAGAAACAAUGCCAU | 204 | 5014-5034 | ATGGCATUGUUTCUGGUUCUCUU | 654 | 5012-5034 |
| AD-1636692.1 | AUGUACCAUGCUAAGGCCAAA | 205 | 4132-4152 | UTUGGCCUUAGCAUGGUACAUUG | 655 | 4130-4152 |
| AD-1636693.1 | CCCGUCGUGCGUUGGCUCAAU | 206 | 3844-3864 | ATUGAGCCAACGCACGACGGGAG | 656 | 3842-3864 |
| AD-1636694.1 | CUAGUGCUGUCCAGUGAGAAA | 207 | 292-312 | UTUCTCACUGGACAGCACUAGUU | 657 | 290-312 |
| AD-1636695.1 | AAAUGAGGGUUUCACAGUCAA | 208 | 4071-4091 | UTGACUGUGAAACCCUCAUUUUC | 658 | 4069-4091 |
| AD-1636696.1 | UGGGCAACUCCAACAAUUACU | 209 | 1439-1459 | AGUAAUTGUUGGAGUUGCCCACG | 659 | 1437-1459 |
| AD-1636697.1 | UGCUAAGGCCAAAGAUCAACU | 210 | 4140-4160 | AGUUGATCUUUGGCCUUAGCAUG | 660 | 4138-4160 |
| AD-1636698.1 | UGCGAUCAGAAGAGACCAAGU | 211 | 4049-4069 | ACUUGGTCUCUTCUGAUCGCAGG | 661 | 4047-4069 |
| AD-1636699.1 | GACAGACAAGACCAUCUACAU | 212 | 492-512 | ATGUAGAUGGUCUUGUCUGUCUG | 662 | 490-512 |
| AD-1636700.1 | GUAAUGCAGGACUUCUUCAUU | 213 | 2566-2586 | AAUGAAGAAGUCCUGCAUUACUG | 663 | 2564-2586 |
| AD-1636701.1 | ACCAGGAACUGAACCUUGAUA | 214 | 3959-3979 | UAUCAAGGUUCAGUUCCUGGUGG | 664 | 3957-3979 |
| AD-1636702.1 | CGUGCGUUGGCUCAAUGAACU | 215 | 3849-3869 | AGUUCATUGAGCCAACGCACGAC | 665 | 3847-3869 |
| AD-1636703.1 | AGUGGACUAUGUGUACAAGAU | 216 | 4713-4733 | ATCUTGTACACAUAGUCCACUCC | 666 | 4711-4733 |
| AD-1636704.1 | UACGUGCUGCCCAGUUUCGAA | 217 | 772-792 | UTCGAAACUGGGCAGCACGUACU | 667 | 770-792 |
| AD-1636705.1 | CUACCCUACUCUGUUGUUCGA | 218 | 2596-2616 | UCGAACAACAGAGUAGGGUAGCC | 668 | 2594-2616 |
| AD-1636706.1 | GUACCUCUUCAUCCAGACAGU | 219 | 477-497 | ACUGTCTGGAUGAAGAGGUACCC | 669 | 475-497 |
| AD-1636707.1 | CACCGUAUCCACUGGGAAUCU | 220 | 4018-4038 | AGAUTCCCAGUGGAUACGGUGGG | 670 | 4016-4038 |
| AD-1636708.1 | UGUUCGUGCUGAAUAAGAAGU | 221 | 1898-1918 | ACUUCUTAUUCAGCACGAACACG | 671 | 1896-1918 |
| AD-1636709.1 | CAUUGAGAACCCGGAAGGCAU | 222 | 591-611 | ATGCCUTCCGGGUUCUCAAUGUU | 672 | 589-611 |
| AD-1636710.1 | GCCUCUUCUUAACAAAUUUCU | 223 | 3705-3725 | AGAAAUTUGUUAAGAAGAGGCCC | 673 | 3703-3725 |
| AD-1636711.1 | UGGACUAUGUGUACAAGACCU | 224 | 4715-4735 | AGGUCUTGUACACAUAGUCCACU | 674 | 4713-4735 |
| AD-1636712.1 | CUGGGAGGACCCUGGUAAGCA | 225 | 3750-3770 | UGCUTACCAGGGUCCUCCCAGCG | 675 | 3748-3770 |
| AD-1636713.1 | GGAGGUUGUGCUGAGCCGGAA | 226 | 987-1007 | UTCCGGCUCAGCACAACCUCCCC | 676 | 985-1007 |
| AD-1636714.1 | ACUACAUGAACCUACAGAGAU | 227 | 3629-3649 | ATCUCUGUAGGTUCAUGUAGUUG | 677 | 3627-3649 |
| AD-1636715.1 | CCUUGUCUUCUCAGAACCAGA | 228 | 629-649 | UCUGGUTCUGAGAAGACAAGGAG | 678 | 627-649 |
| AD-1636716.1 | ACCAGGAUGCCACUAUGUCUA | 229 | 4277-4297 | UAGACATAGUGGCAUCCUGGUCU | 679 | 4275-4297 |
| AD-1636717.1 | GCAGGCAGAGCGCAGCGGGAU | 230 | 1110-1130 | ATCCCGCUGCGCUCUGCCUGCAC | 680 | 1108-1130 |
| AD-1636718.1 | CACCCUCAUCAUCUACCUGGA | 231 | 4419-4439 | UCCAGGTAGAUGAUGAGGGUGUU | 681 | 4417-4439 |
| AD-1636719.1 | CCAGAUCCACUUCACCAAGAU | 232 | 1152-1172 | ATCUTGGUGAAGUGGAUCUGGUA | 682 | 1150-1172 |
| AD-1636720.1 | ACAUGGGCCAGUGGAAGAUCA | 233 | 692-712 | UGAUCUTCCACTGGCCCAUGUUG | 683 | 690-712 |
| AD-1636721.1 | CCACAGCCAAAGAUAAGAACU | 234 | 3728-3748 | AGUUCUTAUCUTUGGCUGUGGUC | 684 | 3726-3748 |
| AD-1636722.1 | UGUACAAGACCCGACUGGUCA | 235 | 4724-4744 | UGACCAGUCGGGUCUUGUACACA | 685 | 4722-4744 |
| AD-1636723.1 | GUGGGAGAAGUUCGGCCUAGA | 236 | 3192-3212 | UCUAGGCCGAACUUCUCCCACUG | 686 | 3190-3212 |
| AD-1636763.1 | AGAGCGGGUACCUCUUCAUCA | 237 | 470-490 | UGAUGAAGAGGTACCCGCUCUGC | 687 | 468-490 |
| AD-1636766.1 | CAAGGUCUACGCCUAUUACAU | 238 | 4524-4544 | ATGUAATAGGCGUAGACCUUGAC | 688 | 4522-4544 |
| AD-1636767.1 | GCUGAGGAGAAUUGCUUCAUU | 239 | 4633-4653 | AAUGAAGCAAUTCUCCUCAGCAC | 689 | 4631-4653 |
| AD-568962.3 | GUACCUCUUCAUCCAGACAGU | 240 | 477-497 | ACUGUCUGGAUGAAGAGGUACCC | 690 | 475-497 |
| AD-568977.3 | GACAGACAAGACCAUCUACAU | 241 | 492-512 | AUGUAGAUGGUCUUGUCUGUCUG | 691 | 490-512 |
| AD-569048.2 | CAUUGAGAACCCGGAAGGCAU | 242 | 591-611 | AUGCCUUCCGGGUUCUCAAUGUU | 692 | 589-611 |
| AD-569266.3 | CAGAGAAAUUCUACUACAUCU | 243 | 809-829 | AGAUGUAGUAGAAUUUCUCUGUA | 693 | 807-829 |
| AD-569268.10 | GAGAAAUUCUACUACAUCUAU | 244 | 811-831 | AUAGAUGUAGUAGAAUUUCUCUG | 694 | 809-831 |
| AD-569269.6 | AGAAAUUCUACUACAUCUAUU | 245 | 812-832 | AAUAGAUGUAGUAGAAUUUCUCU | 695 | 810-832 |
| AD-569494.2 | GCAGGCAGAGCGCAGCGGGAU | 246 | 1110-1130 | AUCCCGCUGCGCUCUGCCUGCAC | 696 | 1108-1130 |
| AD-569516.3 | CCAGAUCCACUUCACCAAGAU | 247 | 1152-1172 | AUCUUGGUGAAGUGGAUCUGGUA | 697 | 1150-1172 |
| AD-569763.5 | UGGGCAACUCCAACAAUUACU | 248 | 1439-1459 | AGUAAUUGUUGGAGUUGCCCACG | 698 | 1437-1459 |
| AD-570132.3 | UGUUCGUGCUGAAUAAGAAGU | 249 | 1898-1918 | ACUUCUUAUUCAGCACGAACACG | 699 | 1896-1918 |
| AD-570134.4 | UUCGUGCUGAAUAAGAAGAAU | 250 | 1900-1920 | AUUCUUCUUAUUCAGCACGAACA | 700 | 1898-1920 |
| AD-570644.2 | GUAAUGCAGGACUUCUUCAUU | 251 | 2566-2586 | AAUGAAGAAGUCCUGCAUUACUG | 701 | 2564-2586 |
| AD-570712.7 | CCGAGCCGUUCUCUACAAUUU | 252 | 2634-2654 | AAAUUGUAGAGAACGGCUCGGAU | 702 | 2632-2654 |
| AD-571552.3 | ACUACAUGAACCUACAGAGAU | 253 | 3629-3649 | AUCUCUGUAGGUUCAUGUAGUUG | 703 | 3627-3649 |
| AD-571610.3 | GCCUCUUCUUAACAAAUUUCU | 254 | 3705-3725 | AGAAAUUUGUUAAGAAGAGGCCC | 704 | 3703-3725 |
| AD-571633.3 | CCACAGCCAAAGAUAAGAACU | 255 | 3728-3748 | AGUUCUUAUCUUUGGCUGUGGUC | 705 | 3726-3748 |
| AD-571715.5 | CUACUGCAGCUAAAAGACUUU | 256 | 3811-3831 | AAAGUCUUUUAGCUGCAGUAGGG | 706 | 3809-3831 |
| AD-571748.3 | CCCGUCGUGCGUUGGCUCAAU | 257 | 3844-3864 | AUUGAGCCAACGCACGACGGGAG | 707 | 3842-3864 |
| AD-571753.4 | CGUGCGUUGGCUCAAUGAACU | 258 | 3849-3869 | AGUUCAUUGAGCCAACGCACGAC | 708 | 3847-3869 |
| AD-571901.2 | CACCGUAUCCACUGGGAAUCU | 259 | 4018-4038 | AGAUUCCCAGUGGAUACGGUGGG | 709 | 4016-4038 |
| AD-571932.2 | UGCGAUCAGAAGAGACCAAGU | 260 | 4049-4069 | ACUUGGUCUCUUCUGAUCGCAGG | 710 | 4047-4069 |
| AD-572022.2 | UGCUAAGGCCAAAGAUCAACU | 261 | 4140-4160 | AGUUGAUCUUUGGCCUUAGCAUG | 711 | 4138-4160 |
| AD-572388.7 | CAAGGUCUACGCCUAUUACAU | 262 | 4524-4544 | AUGUAAUAGGCGUAGACCUUGAC | 712 | 4522-4544 |
| AD-572388.8 | CAAGGUCUACGCCUAUUACAU | 263 | 4524-4544 | AUGUAAUAGGCGUAGACCUUGAC | 713 | 4522-4544 |
| AD-572388.9 | CAAGGUCUACGCCUAUUACAU | 264 | 4524-4544 | AUGUAAUAGGCGUAGACCUUGAC | 714 | 4522-4544 |
| AD-572495.3 | GCUGAGGAGAAUUGCUUCAUU | 265 | 4633-4653 | AAUGAAGCAAUUCUCCUCAGCAC | 715 | 4631-4653 |
| AD-572495.4 | GCUGAGGAGAAUUGCUUCAUU | 266 | 4633-4653 | AAUGAAGCAAUUCUCCUCAGCAC | 716 | 4631-4653 |
| AD-572495.5 | GCUGAGGAGAAUUGCUUCAUU | 267 | 4633-4653 | AAUGAAGCAAUUCUCCUCAGCAC | 717 | 4631-4653 |
| AD-572575.3 | AGUGGACUAUGUGUACAAGAU | 268 | 4713-4733 | AUCUUGUACACAUAGUCCACUCC | 718 | 4711-4733 |
| AD-572577.3 | UGGACUAUGUGUACAAGACCU | 269 | 4715-4735 | AGGUCUUGUACACAUAGUCCACU | 719 | 4713-4735 |
| AD-572818.2 | GAGAACCAGAAACAAUGCCAU | 270 | 5014-5034 | AUGGCAUUGUUUCUGGUUCUCUU | 720 | 5012-5034 |

TABLE 5
Modified Sense and Antisense Strand Sequences of Complement component C3 (C3) dsRNA Agents

| | | SEQ | | SEQ | | SEQ |
|---|---|---|---|---|---|---|
| | | ID | | ID | | ID |
| Duplex Name | Sense Sequence 5′ to 3′ | NO: | Antisense Sequence 5′ to 3′ | NO: | mRNA target sequence 5′ to 3′ | NO: |
| AD-1479283.2 | cscsgagccgUfUfCfucuacaauuuL96 | 271 | asdAsaudTgdTagagdAaCfggcucggsasu | 721 | AUCCGAGCCGUUCUCUACAAUUA | 811 |
| AD-1479341.2 | gsasgaaauuCfUfAfcuacaucuauL96 | 272 | asdTsagdAudGuagudAgAfauuucucsusg | 722 | CAGAGAAAUUCUACUACAUCUAU | 812 |
| AD-1479350.2 | asgsaaauucUfAfCfuacaucuauuL96 | 273 | asdAsuadGadTguagdTaGfaauuucuscsu | 723 | AGAGAAAUUCUACUACAUCUAUA | 813 |
| AD-1531655.2 | asasaugaGfgGfUfUfucacagucaaL96 | 274 | usUfsgacUfgUfGfaaacCfcUfcauuususc | 724 | GAAAAUGAGGGUUUCACAGUCAC | 814 |
| AD-1531656.2 | csusgggaGfgAfCfCfcugguaagcaL96 | 275 | usGfscuuAfcCfAfggguCfcUfcccagscsg | 725 | CGCUGGGAGGACCCUGGUAAGCA | 815 |
| AD-1531657.2 | csusacccUfaCfUfCfuguuguucgaL96 | 276 | usCfsgaaCfaAfCfagagUfaGfgguagscsc | 726 | GGCUACCCUACUCUGUUGUUCGA | 816 |
| AD-1531658.2 | asusguacCfaUfGfCfuaaggccaaaL96 | 277 | usUfsuggCfcUfUfagcaUfgGfuacaususg | 727 | CAAUGUACCAUGCUAAGGCCAAA | 817 |
| AD-1531659.2 | csusagugCfuGfUfCfcagugagaaaL96 | 278 | usUfsucuCfaCfUfggacAfgCfacuagsusu | 728 | AACUAGUGCUGUCCAGUGAGAAG | 818 |
| AD-1531660.2 | ascscaggAfaCfUfGfaaccuugauaL96 | 279 | usAfsucaAfgGfUfucagUfuCfcuggusgsg | 729 | CCACCAGGAACUGAACCUUGAUG | 819 |
| AD-1531662.2 | csascccuCfaUfCfAfucuaccuggaL96 | 280 | usCfscagGfuAfGfaugaUfgAfgggugsusu | 730 | AACACCCUCAUCAUCUACCUGGA | 820 |
| AD-1531663.2 | asgsagcgGfgUfAfCfcucuucaucaL96 | 281 | usGfsaugAfaGfAfgguaCfcCfgcucusgsc | 731 | GCAGAGCGGGUACCUCUUCAUCC | 821 |
| AD-1531663.3 | asgsagcgGfgUfAfCfcucuucaucaL96 | 282 | usGfsaugAfaGfAfgguaCfcCfgcucusgsc | 732 | GCAGAGCGGGUACCUCUUCAUCC | 822 |
| AD-1531663.4 | asgsagcgGfgUfAfCfcucuucaucaL96 | 283 | usGfsaugAfaGfAfgguaCfcCfgcucusgsc | 733 | GCAGAGCGGGUACCUCUUCAUCC | 823 |
| AD-1531664.2 | gsgsagguUfgUfGfCfugagccggaaL96 | 284 | usUfsccgGfcUfCfagcaCfaAfccuccscsc | 734 | GGGGAGGUUGUGCUGAGCCGGAA | 824 |
| AD-1531665.2 | ascsauggGfcCfAfGfuggaagaucaL96 | 285 | usGfsaucUfuCfCfacugGfcCfcaugususg | 735 | CAACAUGGGCCAGUGGAAGAUCC | 825 |
| AD-1531666.2 | gsusgggaGfaAfGfUfucggccuagaL96 | 286 | usCfsuagGfcCfGfaacuUfcUfcccacsusg | 736 | CAGUGGGAGAAGUUCGGCCUAGA | 826 |
| AD-1531668.2 | cscsuuguCfuUfCfUfcagaaccagaL96 | 287 | usCfsuggUfuCfUfgagaAfgAfcaaggsasg | 737 | CUCCUUGUCUUCUCAGAACCAGC | 827 |
| AD-1531669.2 | usgsuacaAfgAfCfCfcgacuggucaL96 | 288 | usGfsaccAfgUfCfggguCfuUfguacascsa | 738 | UGUGUACAAGACCCGACUGGUCA | 828 |
| AD-1531671.2 | usascgugCfuGfCfCfcaguuucgaaL96 | 289 | usUfscgaAfaCfUfgggcAfgCfacguascsu | 739 | AGUACGUGCUGCCCAGUUUCGAG | 829 |
| AD-1531672.2 | ascscaggAfuGfCfCfacuaugucuaL96 | 290 | usAfsgacAfuAfGfuggcAfuCfcugguscsu | 740 | AGACCAGGAUGCCACUAUGUCUA | 830 |
| AD-1636688.1 | ususcgugcuGfAfAfuaagaagaauL96 | 291 | asdTsucdTudCuuaudTcAfgcacgaascsa | 741 | UGUUCGUGCUGAAUAAGAAGAAC | 831 |
| AD-1636689.1 | csasgagaaaUfUfCfuacuacaucuL96 | 292 | asdGsaudGudAguagdAaUfuucucugsusa | 742 | UACAGAGAAAUUCUACUACAUCU | 832 |
| AD-1636690.1 | csusacugcaGfCfUfaaaagacuuuL96 | 293 | asdAsagdTcdTuuuadGcUfgcaguagsgsg | 743 | CCCUACUGCAGCUAAAAGACUUU | 833 |
| AD-1636691.1 | gsasgaaccaGfAfAfacaaugccauL96 | 294 | asdTsggdCadTuguudTcUfgguucucsusu | 744 | AAGAGAACCAGAAACAAUGCCAG | 834 |
| AD-1636692.1 | asusguaccaUfGfCfuaaggccaaaL96 | 295 | usdTsugdGcdCuuagdCaUfgguacaususg | 745 | CAAUGUACCAUGCUAAGGCCAAA | 835 |
| AD-1636693.1 | cscscgucguGfCfGfuuggcucaauL96 | 296 | asdTsugdAgdCcaacdGcAfcgacgggsasg | 746 | CUCCCGUCGUGCGUUGGCUCAAU | 836 |
| AD-1636694.1 | csusagugcuGfUfCfcagugagaaaL96 | 297 | usdTsucdTcdAcuggdAcAfgcacuagsusu | 747 | AACUAGUGCUGUCCAGUGAGAAG | 837 |
| AD-1636695.1 | asasaugaggGfUfUfucacagucaaL96 | 298 | usdTsgadCudGugaadAcCfcucauuususc | 748 | GAAAAUGAGGGUUUCACAGUCAC | 838 |
| AD-1636696.1 | usgsggcaacUfCfCfaacaauuacuL96 | 299 | asdGsuadAudTguugdGaGfuugcccascsg | 749 | CGUGGGCAACUCCAACAAUUACC | 839 |
| AD-1636697.1 | usgscuaaggCfCfAfaagaucaacuL96 | 300 | asdGsuudGadTcuuudGgCfcuuagcasusg | 750 | CAUGCUAAGGCCAAAGAUCAACU | 840 |
| AD-1636698.1 | usgscgaucaGfAfAfgagaccaaguL96 | 301 | asdCsuudGgdTcucudTcUfgaucgcasgsg | 751 | CCUGCGAUCAGAAGAGACCAAGG | 841 |
| AD-1636699.1 | gsascagacaAfGfAfccaucuacauL96 | 302 | asdTsgudAgdAuggudCuUfgucugucsusg | 752 | CAGACAGACAAGACCAUCUACAC | 842 |
| AD-1636700.1 | gsusaaugcaGfGfAfcuucuucauuL96 | 303 | asdAsugdAadGaagudCcUfgcauuacsusg | 753 | CAGUAAUGCAGGACUUCUUCAUC | 843 |
| AD-1636701.1 | ascscaggaaCfUfGfaaccuugauaL96 | 304 | usdAsucdAadGguucdAgUfuccuggusgsg | 754 | CCACCAGGAACUGAACCUUGAUG | 844 |
| AD-1636702.1 | csgsugcguuGfGfCfucaaugaacuL96 | 305 | asdGsuudCadTugagdCcAfacgcacgsasc | 755 | GUCGUGCGUUGGCUCAAUGAACA | 845 |
| AD-1636703.1 | asgsuggacuAfUfGfuguacaagauL96 | 306 | asdTscudTgdTacacdAuAfguccacuscsc | 756 | GGAGUGGACUAUGUGUACAAGAC | 846 |
| AD-1636704.1 | usascgugcuGfCfCfcaguuucgaaL96 | 307 | usdTscgdAadAcuggdGcAfgcacguascsu | 757 | AGUACGUGCUGCCCAGUUUCGAG | 847 |
| AD-1636705.1 | csusacccuaCfUfCfuguuguucgaL96 | 308 | usdCsgadAcdAacagdAgUfaggguagscsc | 758 | GGCUACCCUACUCUGUUGUUCGA | 848 |
| AD-1636706.1 | gsusaccucuUfCfAfuccagacaguL96 | 309 | asdCsugdTcdTggaudGaAfgagguacscsc | 759 | GGGUACCUCUUCAUCCAGACAGA | 849 |
| AD-1636707.1 | csasccguauCfCfAfcugggaaucuL96 | 310 | asdGsaudTcdCcagudGgAfuacggugsgsg | 760 | CCCACCGUAUCCACUGGGAAUCU | 850 |
| AD-1636708.1 | usgsuucgugCfUfGfaauaagaaguL96 | 311 | asdCsuudCudTauucdAgCfacgaacascsg | 761 | CGUGUUCGUGCUGAAUAAGAAGA | 851 |
| AD-1636709.1 | csasuugagaAfCfCfcggaaggcauL96 | 312 | asdTsgcdCudTccggdGuUfcucaaugsusu | 762 | AACAUUGAGAACCCGGAAGGCAU | 852 |
| AD-1636710.1 | gscscucuucUfUfAfacaaauuucuL96 | 313 | asdGsaadAudTuguudAaGfaagaggcscsc | 763 | GGGCCUCUUCUUAACAAAUUUCU | 853 |
| AD-1636711.1 | usgsgacuauGfUfGfuacaagaccuL96 | 314 | asdGsgudCudTguacdAcAfuaguccascsu | 764 | AGUGGACUAUGUGUACAAGACCC | 854 |
| AD-1636712.1 | csusgggaggAfCfCfcugguaagcaL96 | 315 | usdGscudTadCcaggdGuCfcucccagscsg | 765 | CGCUGGGAGGACCCUGGUAAGCA | 855 |
| AD-1636713.1 | gsgsagguugUfGfCfugagccggaaL96 | 316 | usdTsccdGgdCucagdCaCfaaccuccscsc | 766 | GGGGAGGUUGUGCUGAGCCGGAA | 856 |
| AD-1636714.1 | ascsuacaugAfAfCfcuacagagauL96 | 317 | asdTscudCudGuaggdTuCfauguagususg | 767 | CAACUACAUGAACCUACAGAGAU | 857 |
| AD-1636715.1 | cscsuugucuUfCfUfcagaaccagaL96 | 318 | usdCsugdGudTcugadGaAfgacaaggsasg | 768 | CUCCUUGUCUUCUCAGAACCAGC | 858 |
| AD-1636716.1 | ascscaggauGfCfCfacuaugucuaL96 | 319 | usdAsgadCadTagugdGcAfuccugguscsu | 769 | AGACCAGGAUGCCACUAUGUCUA | 859 |
| AD-1636717.1 | gscsaggcagAfGfCfgcagcgggauL96 | 320 | asdTsccdCgdCugcgdCuCfugccugcsasc | 770 | GUGCAGGCAGAGCGCAGCGGGAU | 860 |
| AD-1636718.1 | csascccucaUfCfAfucuaccuggaL96 | 321 | usdCscadGgdTagaudGaUfgagggugsusu | 771 | AACACCCUCAUCAUCUACCUGGA | 861 |
| AD-1636719.1 | cscsagauccAfCfUfucaccaagauL96 | 322 | asdTscudTgdGugaadGuGfgaucuggsusa | 772 | UACCAGAUCCACUUCACCAAGAC | 862 |
| AD-1636720.1 | ascsaugggcCfAfGfuggaagaucaL96 | 323 | usdGsaudCudTccacdTgGfcccaugususg | 773 | CAACAUGGGCCAGUGGAAGAUCC | 863 |
| AD-1636721.1 | cscsacagccAfAfAfgauaagaacuL96 | 324 | asdGsuudCudTaucudTuGfgcuguggsusc | 774 | GACCACAGCCAAAGAUAAGAACC | 864 |
| AD-1636722.1 | usgsuacaagAfCfCfcgacuggucaL96 | 325 | usdGsacdCadGucggdGuCfuuguacascsa | 775 | UGUGUACAAGACCCGACUGGUCA | 865 |
| AD-1636723.1 | gsusgggagaAfGfUfucggccuagaL96 | 326 | usdCsuadGgdCcgaadCuUfcucccacsusg | 776 | CAGUGGGAGAAGUUCGGCCUAGA | 866 |
| AD-1636763.1 | asgsagcgggUfAfCfcucuucaucaL96 | 327 | usdGsaudGadAgaggdTaCfccgcucusgsc | 777 | GCAGAGCGGGUACCUCUUCAUCC | 867 |
| AD-1636766.1 | csasaggucuAfCfGfccuauuacauL96 | 328 | asdTsgudAadTaggcdGuAfgaccuugsasc | 778 | GUCAAGGUCUACGCCUAUUACAA | 868 |
| AD-1636767.1 | gscsugaggaGfAfAfuugcuucauuL96 | 329 | asdAsugdAadGcaaudTcUfccucagcsasc | 779 | GUGCUGAGGAGAAUUGCUUCAUA | 869 |
| AD-568962.3 | gsusaccuCfuUfCfAfuccagacaguL96 | 330 | asCfsuguCfuGfGfaugaAfgAfgguacscsc | 780 | GGGUACCUCUUCAUCCAGACAGA | 870 |
| AD-568977.3 | gsascagaCfaAfGfAfccaucuacauL96 | 331 | asUfsguaGfaUfGfgucuUfgUfcugucsusg | 781 | CAGACAGACAAGACCAUCUACAC | 871 |
| AD-569048.2 | csasuugaGfaAfCfCfcggaaggcauL96 | 332 | asUfsgccUfuCfCfggguUfcUfcaaugsusu | 782 | AACAUUGAGAACCCGGAAGGCAU | 872 |
| AD-569266.3 | csasgagaAfaUfUfCfuacuacaucuL96 | 333 | asGfsaugUfaGfUfagaaUfuUfcucugsusa | 783 | UACAGAGAAAUUCUACUACAUCU | 873 |
| AD-569268.10 | gsasgaaaUfuCfUfAfcuacaucuauL96 | 334 | asUfsagaUfgUfAfguagAfaUfuucucsusg | 784 | CAGAGAAAUUCUACUACAUCUAU | 874 |
| AD-569269.6 | asgsaaauUfcUfAfCfuacaucuauuL96 | 335 | asAfsuagAfuGfUfaguaGfaAfuuucuscsu | 785 | AGAGAAAUUCUACUACAUCUAUA | 875 |
| AD-569494.2 | gscsaggcAfgAfGfCfgcagcgggauL96 | 336 | asUfscccGfcUfGfcgcuCfuGfccugcsasc | 786 | GUGCAGGCAGAGCGCAGCGGGAU | 876 |
| AD-569516.3 | cscsagauCfcAfCfUfucaccaagauL96 | 337 | asUfscuuGfgUfGfaaguGfgAfucuggsusa | 787 | UACCAGAUCCACUUCACCAAGAC | 877 |
| AD-569763.5 | usgsggcaAfcUfCfCfaacaauuacuL96 | 338 | asGfsuaaUfuGfUfuggaGfuUfgcccascsg | 788 | CGUGGGCAACUCCAACAAUUACC | 878 |
| AD-570132.3 | usgsuucgUfgCfUfGfaauaagaaguL96 | 339 | asCfsuucUfuAfUfucagCfaCfgaacascsg | 789 | CGUGUUCGUGCUGAAUAAGAAGA | 879 |
| AD-570134.4 | ususcgugCfuGfAfAfuaagaagaauL96 | 340 | asUfsucuUfcUfUfauucAfgCfacgaascsa | 790 | UGUUCGUGCUGAAUAAGAAGAAC | 880 |
| AD-570644.2 | gsusaaugCfaGfGfAfcuucuucauuL96 | 341 | asAfsugaAfgAfAfguccUfgCfauuacsusg | 791 | CAGUAAUGCAGGACUUCUUCAUC | 881 |
| AD-570712.7 | cscsgagcCfgUfUfCfucuacaauuuL96 | 342 | asAfsauuGfuAfGfagaaCfgGfcucggsasu | 792 | AUCCGAGCCGUUCUCUACAAUUA | 882 |
| AD-571552.3 | ascsuacaUfgAfAfCfcuacagagauL96 | 343 | asUfscucUfgUfAfgguuCfaUfguagususg | 793 | CAACUACAUGAACCUACAGAGAU | 883 |
| AD-571610.3 | gscscucuUfcUfUfAfacaaauuucuL96 | 344 | asGfsaaaUfuUfGfuuaaGfaAfgaggcscsc | 794 | GGGCCUCUUCUUAACAAAUUUCU | 884 |
| AD-571633.3 | cscsacagCfcAfAfAfgauaagaacuL96 | 345 | asGfsuucUfuAfUfcuuuGfgCfuguggsusc | 795 | GACCACAGCCAAAGAUAAGAACC | 885 |
| AD-571715.5 | csusacugCfaGfCfUfaaaagacuuuL96 | 346 | asAfsaguCfuUfUfuagcUfgCfaguagsgsg | 796 | CCCUACUGCAGCUAAAAGACUUU | 886 |
| AD-571748.3 | cscscgucGfuGfCfGfuuggcucaauL96 | 347 | asUfsugaGfcCfAfacgcAfcGfacgggsasg | 797 | CUCCCGUCGUGCGUUGGCUCAAU | 887 |
| AD-571753.4 | csgsugcgUfuGfGfCfucaaugaacuL96 | 348 | asGfsuucAfuUfGfagccAfaCfgcacgsasc | 798 | GUCGUGCGUUGGCUCAAUGAACA | 888 |
| AD-571901.2 | csasccguAfuCfCfAfcugggaaucuL96 | 349 | asGfsauuCfcCfAfguggAfuAfcggugsgsg | 799 | CCCACCGUAUCCACUGGGAAUCU | 889 |
| AD-571932.2 | usgscgauCfaGfAfAfgagaccaaguL96 | 350 | asCfsuugGfuCfUfcuucUfgAfucgcasgsg | 800 | CCUGCGAUCAGAAGAGACCAAGG | 890 |
| AD-572022.2 | usgscuaaGfgCfCfAfaagaucaacuL96 | 351 | asGfsuugAfuCfUfuuggCfcUfuagcasusg | 801 | CAUGCUAAGGCCAAAGAUCAACU | 891 |
| AD-572388.7 | csasagguCfuAfCfGfccuauuacauL96 | 352 | asUfsguaAfuAfGfgcguAfgAfccuugsasc | 802 | GUCAAGGUCUACGCCUAUUACAA | 892 |
| AD-572388.8 | csasagguCfuAfCfGfccuauuacauL96 | 353 | asUfsguaAfuAfGfgcguAfgAfccuugsasc | 803 | GUCAAGGUCUACGCCUAUUACAA | 893 |
| AD-572388.9 | csasagguCfuAfCfGfccuauuacauL96 | 354 | asUfsguaAfuAfGfgcguAfgAfccuugsasc | 804 | GUCAAGGUCUACGCCUAUUACAA | 894 |
| AD-572495.3 | gscsugagGfaGfAfAfuugcuucauuL96 | 355 | asAfsugaAfgCfAfauucUfcCfucagcsasc | 805 | GUGCUGAGGAGAAUUGCUUCAUA | 895 |
| AD-572495.4 | gscsugagGfaGfAfAfuugcuucauuL96 | 356 | asAfsugaAfgCfAfauucUfcCfucagcsasc | 806 | GUGCUGAGGAGAAUUGCUUCAUA | 896 |
| AD-572495.5 | gscsugagGfaGfAfAfuugcuucauuL96 | 357 | asAfsugaAfgCfAfauucUfcCfucagcsasc | 807 | GUGCUGAGGAGAAUUGCUUCAUA | 897 |
| AD-572575.3 | asgsuggaCfuAfUfGfuguacaagauL96 | 358 | asUfscuuGfuAfCfacauAfgUfccacuscsc | 808 | GGAGUGGACUAUGUGUACAAGAC | 898 |
| AD-572577.3 | usgsgacuAfuGfUfGfuacaagaccuL96 | 359 | asGfsgucUfuGfUfacacAfuAfguccascsu | 809 | AGUGGACUAUGUGUACAAGACCC | 899 |
| AD-572818.2 | gsasgaacCfaGfAfAfacaaugccauL96 | 360 | asUfsggcAfuUfGfuuucUfgGfuucucsusu | 810 | AAGAGAACCAGAAACAAUGCCAG | 900 |

TABLE 6
In Vitro C3 Single Dose Screen in Hep3b Cells

| | Dose | | | | | |
|---|---|---|---|---|---|---|
| | 10 nM | | 1 nM | | 0.1 nM | |
| | Avg % of | | Avg % of | | Avg % of | |
| | message | ST | message | ST | message | ST |
| Duplex | remaining | DEV | remaining | DEV | remaining | DEV |
| AD-1479341.1 | 39.87 | 6.95 | 57.30 | 7.69 | 111.87 | 2.74 |
| AD-1479342.1 | 29.99 | 8.59 | 45.56 | 7.39 | 81.11 | 22.91 |
| AD-1479343.1 | 40.90 | 6.03 | 42.31 | 7.83 | 60.71 | 5.05 |
| AD-1479345.1 | 36.36 | 10.41 | 63.80 | 15.92 | 51.93 | 5.14 |
| AD-1479346.1 | 34.72 | 2.54 | 58.19 | 16.04 | 69.03 | 12.85 |
| AD-1479347.1 | 62.39 | 6.87 | 37.27 | 10.10 | 104.10 | 24.20 |
| AD-1479348.1 | 62.02 | 8.20 | 44.52 | 9.22 | 110.65 | 17.26 |
| AD-1479349.1 | 47.82 | 4.58 | 61.53 | 8.08 | 118.23 | 17.66 |
| AD-569268.7 | 45.43 | 9.06 | 60.82 | 0.24 | 90.82 | 19.72 |
| AD-1479350.1 | 23.87 | 6.42 | 37.28 | 10.75 | 48.62 | 9.34 |
| AD-1479351.1 | 33.57 | 4.43 | 51.88 | 9.85 | 74.71 | 18.85 |
| AD-1479352.1 | 28.37 | 4.96 | 45.55 | 8.62 | 67.94 | 11.34 |
| AD-1479353.1 | 40.16 | 8.24 | 45.29 | 9.85 | 117.43 | 14.02 |
| AD-1479354.1 | 38.17 | 7.76 | 45.54 | 15.06 | 69.82 | 15.51 |
| AD-1479355.1 | 36.23 | 4.82 | 41.34 | 4.51 | 98.91 | 19.79 |
| AD-1479358.1 | 27.67 | 6.66 | 53.81 | 10.81 | 47.37 | 7.35 |
| AD-1479359.1 | 28.83 | 5.60 | 45.49 | 11.64 | 63.31 | 14.66 |
| AD-1479360.1 | 29.08 | 1.90 | 42.92 | 7.49 | 72.76 | 10.80 |
| AD-1479361.1 | 52.09 | 12.78 | 75.45 | 21.59 | 101.44 | 17.74 |
| AD-1479362.1 | 32.16 | 5.33 | 34.97 | 0.17 | 51.99 | 5.85 |
| AD-1479363.1 | 28.67 | 1.22 | 53.99 | 12.44 | 69.95 | 15.81 |
| AD-1479367.1 | 27.27 | 1.79 | 38.05 | 9.28 | 46.86 | 6.01 |
| AD-569269.4 | 23.48 | 7.48 | 37.57 | 7.24 | 62.30 | 17.22 |
| AD-1479344.1 | 36.95 | 6.81 | 55.69 | 6.23 | 53.45 | 3.32 |
| AD-1479356.1 | 26.21 | 8.16 | 41.20 | 10.04 | 53.36 | 1.87 |
| AD-1479357.1 | 26.66 | 5.58 | 43.81 | 12.02 | 67.08 | 15.27 |
| AD-1479364.1 | 27.15 | 1.94 | 37.24 | 4.15 | 59.60 | 12.53 |
| AD-1479365.1 | 25.46 | 4.73 | 48.35 | 9.38 | 82.37 | 12.12 |
| AD-1479366.1 | 25.17 | 4.00 | 32.56 | 5.01 | 64.86 | 11.90 |
| AD-1479283.1 | 45.49 | 7.14 | 71.86 | 9.16 | 98.76 | 13.29 |
| AD-1479284.1 | 38.33 | 2.88 | 68.90 | 12.08 | 94.72 | 13.04 |
| AD-1479285.1 | 43.17 | 2.89 | 72.52 | 15.11 | 96.00 | 8.76 |
| AD-1479287.1 | 56.96 | 6.29 | 54.10 | 10.03 | 105.22 | 11.98 |
| AD-1479288.1 | 34.84 | 3.56 | 66.40 | 10.91 | 115.72 | 14.78 |
| AD-1479289.1 | 36.50 | 6.88 | 78.58 | 12.48 | 93.10 | 12.18 |
| AD-1479290.1 | 54.31 | 4.38 | 73.63 | 4.21 | 100.40 | 15.46 |
| AD-1479291.1 | 57.62 | 11.30 | 69.79 | 4.18 | 106.29 | 13.62 |
| AD-1479292.1 | 52.72 | 10.87 | 75.09 | 14.53 | 105.78 | 9.46 |
| AD-1479296.1 | 52.20 | 5.49 | 69.62 | 2.73 | 81.69 | 19.42 |
| AD-570712.4 | 47.89 | 5.38 | 73.62 | 9.42 | 103.74 | 5.05 |
| AD-1479297.1 | 51.22 | 10.68 | 61.12 | 2.08 | 83.22 | 10.33 |
| AD-1479298.1 | 36.82 | 8.37 | 60.49 | 4.65 | 90.97 | 5.22 |
| AD-1479299.1 | 45.59 | 5.61 | 70.93 | 5.07 | 118.44 | 22.76 |
| AD-1479301.1 | 55.41 | 5.60 | 64.31 | 12.30 | 93.10 | 19.12 |
| AD-1479302.1 | 46.14 | 5.68 | 60.33 | 8.04 | 83.77 | 15.00 |
| AD-1479303.1 | 50.77 | 7.71 | 72.85 | 10.65 | 100.74 | 9.07 |
| AD-1479304.1 | 57.20 | 13.07 | 63.76 | 5.38 | 109.73 | 12.99 |
| AD-1479305.1 | 56.04 | 5.95 | 70.94 | 2.17 | 108.76 | 20.05 |
| AD-1479306.1 | 45.22 | 8.71 | 79.47 | 10.47 | 89.24 | 16.69 |
| AD-1479310.1 | 54.41 | 11.98 | 81.38 | 3.52 | 95.56 | 16.92 |
| AD-570713.4 | 45.99 | 5.61 | 72.73 | 10.05 | 97.69 | 21.74 |
| AD-1479286.1 | 37.20 | 6.71 | 55.50 | 11.54 | 85.46 | 14.42 |
| AD-1479293.1 | 43.23 | 5.83 | 92.76 | 18.73 | 104.63 | 11.22 |
| AD-1479294.1 | 37.12 | 8.47 | 54.75 | 3.07 | 76.40 | 11.90 |
| AD-1479295.1 | 41.08 | 6.08 | 59.53 | 4.44 | 66.51 | 8.49 |
| AD-1479311.1 | 45.87 | 9.61 | 81.27 | 9.10 | 91.82 | 14.85 |
| AD-1479312.1 | 54.86 | 8.97 | 85.69 | 10.71 | 97.38 | 11.43 |
| AD-1479313.1 | 44.89 | 10.37 | 76.67 | 7.31 | 117.06 | 10.64 |
| AD-1479314.1 | 69.85 | 11.50 | 89.42 | 11.83 | 100.77 | 15.60 |
| AD-1479315.1 | 51.30 | 11.51 | 88.68 | 8.42 | 82.68 | 13.08 |
| AD-1479316.1 | 73.71 | 6.19 | 84.28 | 16.97 | 73.35 | 12.19 |
| AD-1479317.1 | 51.71 | 13.74 | 87.69 | 20.33 | 62.46 | 5.93 |
| AD-1479318.1 | 58.66 | 8.53 | 82.62 | 8.19 | 105.65 | 12.01 |
| AD-1479319.1 | 55.83 | 12.43 | 84.03 | 6.73 | 109.22 | 31.34 |
| AD-1479320.1 | 84.29 | 18.81 | 110.15 | 17.07 | 137.09 | 11.07 |
| AD-1479321.1 | 35.70 | 8.03 | 71.16 | 17.20 | 87.50 | 25.10 |
| AD-1479322.1 | 57.24 | 15.06 | 82.37 | 8.77 | 76.89 | 9.76 |
| AD-1479323.1 | 56.38 | 10.55 | 83.17 | 15.84 | 84.50 | 7.30 |
| AD-1479324.1 | 58.83 | 12.19 | 105.01 | 13.86 | 105.85 | 13.82 |
| AD-1479325.1 | 110.55 | 9.54 | 82.30 | 24.45 | 130.86 | 14.37 |
| AD-1479326.1 | 54.17 | 13.59 | 64.99 | 13.39 | 128.09 | 33.45 |
| AD-1479327.1 | 65.64 | 4.86 | 79.22 | 12.25 | 87.54 | 29.04 |
| AD-1479328.1 | 44.51 | 11.90 | 39.68 | 7.74 | 62.06 | 0.30 |
| AD-1479329.1 | 34.88 | 8.64 | 56.38 | 14.77 | 85.88 | 22.77 |
| AD-1479330.1 | 33.62 | 4.45 | 38.89 | 11.32 | 59.51 | 6.87 |
| AD-1479331.1 | 27.81 | 5.12 | 61.12 | 24.52 | 89.23 | 20.93 |
| AD-1479332.1 | 36.22 | 5.65 | 63.06 | 17.73 | 65.03 | 7.37 |
| AD-1479333.1 | 51.41 | 8.55 | 80.66 | 6.38 | 116.83 | 11.49 |
| AD-1479334.1 | 61.86 | 9.32 | 68.51 | 19.06 | 134.90 | 3.31 |
| AD-1479335.1 | 39.09 | 10.22 | 84.37 | 9.04 | 94.07 | 24.61 |
| AD-1479336.1 | 42.95 | 5.79 | 58.21 | 9.54 | 99.25 | 25.91 |
| AD-1479337.1 | 48.35 | 11.83 | 64.77 | 8.41 | 83.89 | 21.05 |
| AD-1479338.1 | 59.20 | 14.23 | 67.02 | 17.88 | 95.38 | 23.17 |
| AD-1479339.1 | 62.38 | 10.12 | 67.60 | 10.16 | 72.78 | 14.56 |
| AD-1479340.1 | 53.56 | 11.48 | 46.53 | 7.67 | 80.24 | 8.17 |
| AD-570714.10 | 49.57 | 14.89 | 63.65 | 7.93 | 101.26 | 11.20 |
| AD-1479300.1 | 32.99 | 3.78 | 52.36 | 4.80 | 87.58 | 11.58 |
| AD-1479307.1 | 42.46 | 1.72 | 59.14 | 12.10 | 107.47 | 16.38 |
| AD-1479308.1 | 38.76 | 10.60 | 83.73 | 7.77 | 101.82 | 19.30 |
| AD-1479309.1 | 45.06 | 3.89 | 69.69 | 12.10 | 99.81 | 8.96 |

### Example 3. In Vivo Screening of dsRNA Duplexes in Mice

[0732] Duplexes of interest, identified from the above in vitro studies, were evaluated in vivo. In particular, at pre-dose day-14 wild-type mice (C57BL/6) were transduced by intravenous administration of 2×10¹⁰ viral particles of an adeno-associated virus 8 (AAV8) vector encoding human C3. In particular, mice were administered an AAV8 encoding the open reading frame of human C3 mRNA (AAV8.HsC3-p1).

[0733] At day 0, groups of three mice were subcutaneously administered a single 10 mg/kg dose of the agents of interest or PBS control. At day 14 post-dose animals were sacrificed, liver samples were collected and snap-frozen in liquid nitrogen. Tissue mRNA was extracted and analyzed by the RT-qPCR method.

[0734] Human C3 mRNA levels were compared to housekeeping gene GAPDH. The values were then normalized to the average of PBS vehicle control group. The data were expressed as percent of baseline value, and presented as mean plus standard deviation. The results, listed in Table 7 and shown in FIG. 2, demonstrate that the exemplary duplex agents tested effectively reduce the level of the human C3 messenger RNA in vivo.

TABLE 7

| | % Message | |
|---|---|---|
| Group | Remaining | StDev |
| PBS | 100.00 | 26.96 |
| Naïve | 95.31 | 7.79 |
| AD-569268.9 | 27.93 | 4.87 |
| AD-1479342.2 | 44.67 | 15.18 |
| AD-1479343.2 | 37.88 | 15.44 |
| AD-1479344.2 | 48.50 | 16.77 |
| AD-1479345.2 | 42.78 | 21.47 |
| AD-1479346.2 | 54.62 | 7.46 |
| AD-570712.6 | 21.58 | 5.99 |
| AD-1479289.2 | 44.82 | 9.38 |
| AD-570713.5 | 25.75 | 4.19 |
| AD-570714.11 | 27.34 | 1.80 |
| AD-1479311.2 | 32.11 | 5.69 |
| AD-1479312.2 | 17.64 | 2.37 |
| AD-1479317.2 | 31.05 | 12.98 |
| AD-1479328.2 | 48.32 | 11.54 |
| AD-64958.114 (Positive Control) | 20.41 | 16.19 |

### EQUIVALENTS

[0735] Those skilled in the art will recognize, or be able to ascertain using no more than routine experimentation, many equivalents to the specific embodiments and methods described herein. Such equivalents are intended to be encompassed by the scope of the following claims.

1. A double stranded ribonucleic acid (dsRNA) agent for inhibiting expression of complement component C3 (C3) in a cell, wherein the dsRNA agent comprises a sense strand and an antisense strand forming a double stranded region,
(a) wherein the antisense strand comprises a region of complementarity to an mRNA encoding C3, and wherein the region of complementarity comprises at least 15 contiguous nucleotides differing by no more than 3 nucleotides from any one of the antisense nucleotide sequences in any one of Tables 2-5; or
(b) wherein the sense strand comprises at least 15 contiguous nucleotides differing by no more than three nucleotides from any one of the nucleotide sequence of nucleotides 809-831, 810-832, 811-831, 812-832, 2632-2654, 2633-2655, 2634-2654, 2634-2656, or 2635-2655 of SEQ ID NO: 901, and the antisense strand comprises at least 15 contiguous nucleotides from the corresponding nucleotide sequence of SEQ ID NO:902.

2.-6. (canceled)

7. The dsRNA agent of claim 1, wherein all of the nucleotides of the sense strand and all of the nucleotides of the antisense strand comprise a nucleotide modification.

8. The dsRNA agent of claim 7, wherein at least one of the nucleotide modifications is selected from the group consisting of a deoxy-nucleotide modification, a 3′-terminal deoxythimidine (dT) nucleotide modification, a 2′-O-methyl nucleotide modification, a 2′-fluoro nucleotide modification, a 2′-deoxy nucleotide modification, a 2′-5′-linked ribonucleotide (3′-RNA) modification, a locked nucleotide modification, an unlocked nucleotide modification, a conformationally restricted nucleotide modification, a constrained ethyl nucleotide modification, an abasic nucleotide modification, a 2′-amino nucleotide modification, a 2′-O-allyl nucleotide modification, 2′-C-alkyl nucleotide modification, 2′-hydroxly nucleotide modification, a 2′-methoxyethyl nucleotide modification, a 2′-O-alkyl nucleotide modification, a morpholino nucleotide modification, a phosphoramidate modification, a non-natural base comprising nucleotide modification, a tetrahydropyran nucleotide modification, a 1,5-anhydrohexitol nucleotide modification, a cyclohexenyl nucleotide modification, a nucleotide comprising a phosphorothioate group modification, a nucleotide comprising a methylphosphonate group modification, a nucleotide comprising a 5′-phosphate modification, a nucleotide comprising a 5′-phosphate mimic modification, a vinyl-phosphonate nucleotide modification, a thermally destabilizing nucleotide modification, a glycol nucleotide (GNA) modification, a nucleotide comprising a 2′ phosphate modification, and a 2-O—(N-methylacetamide) nucleotide modification; and combinations thereof.

9.-12. (canceled)

13. The dsRNA agent of claim 1, wherein the double stranded region is 19-30 nucleotide pairs in length.

14.-17. (canceled)

18. The dsRNA agent of claim 1, wherein each strand is independently no more than 30 nucleotides in length.

19.-24. (canceled)

25. The dsRNA agent of claim 1, further comprising a ligand.

26. The dsRNA agent of claim 25, wherein the ligand is conjugated to the 3′ end of the sense strand of the dsRNA agent.

27. The dsRNA agent of claim 25, wherein the ligand is an N-acetylgalactosamine (GalNAc) derivative.

28. The dsRNA agent of claim 25, wherein the ligand is one or more GalNAc derivatives attached through a monovalent, bivalent, or trivalent branched linker.

29. The dsRNA agent of claim 27, wherein the ligand is

[chemical structure]

30. The dsRNA agent of claim 29, wherein the dsRNA agent is conjugated to the ligand as shown in the following schematic [chemical structure]
and, wherein X is O or S.

31. The dsRNA agent of claim 30, wherein X is O.

32. The dsRNA agent of claim 1, wherein the dsRNA agent further comprises at least one phosphorothioate or methylphosphonate internucleotide linkage.

33.-41. (canceled)

42. A cell containing the dsRNA agent of claim 1.

43. A pharmaceutical composition for inhibiting expression of a gene encoding complement component C3 (C3) comprising the dsRNA agent of claim 1 and a pharmaceutically acceptable carrier.

44.-48. (canceled)

49. A method of inhibiting expression of a complement component C3 (C3) gene in a cell, the method comprising contacting the cell with the dsRNA agent of claim 1, thereby inhibiting expression of the C3 gene in the cell.

50.-56. (canceled)

57. A method of treating a subject having a disorder that would benefit from reduction in complement component C3 (C3) expression, comprising administering to the subject a therapeutically effective amount of the dsRNA agent of claim 1, thereby treating the subject having the disorder that would benefit from reduction in C3 expression.

58. (canceled)

59. The method of claim 57, wherein the disorder is a C3-associated disorder.

60. (canceled)

61. (canceled)

62. The method of claim 57, wherein the subject is a human.

63.-75. (canceled)

The application's sequence listing, which the Patent Office published only in electronic form, follows.

SEQUENCE LISTING (914 sequences)

SEQ ID NO: 1 - RNA, 21 nt, synthetic construct
  source 1..21: mol_type = other RNA
ccgagccgttctctacaattt

SEQ ID NO: 2 - RNA, 21 nt, synthetic construct
  source 1..21: mol_type = other RNA
ccgagccgttctctacaatta

SEQ ID NO: 3 - RNA, 21 nt, synthetic construct
  source 1..21: mol_type = other RNA
ccgagccgttctctacaattt

SEQ ID NO: 4 - RNA, 19 nt, synthetic construct
  source 1..19: mol_type = other RNA
gagccgttctctacaattt

SEQ ID NO: 5 - RNA, 21 nt, synthetic construct
  source 1..21: mol_type = other RNA
ccgacccgttctctacaattt

SEQ ID NO: 6 - RNA, 21 nt, synthetic construct
  source 1..21: mol_type = other RNA
ccgtgccgttctctacaattt

SEQ ID NO: 7 - RNA, 21 nt, synthetic construct
  source 1..21: mol_type = other RNA
cccagccgttctctacaattt

SEQ ID NO: 8 - RNA, 21 nt, synthetic construct
  source 1..21: mol_type = other RNA
ccgacccgttctctacaattt

SEQ ID NO: 9 - RNA, 21 nt, synthetic construct
  source 1..21: mol_type = other RNA
ccgtgccgttctctacaattt

SEQ ID NO: 10 - RNA, 21 nt, synthetic construct
  source 1..21: mol_type = other RNA
cccagccgttctctacaattt

SEQ ID NO: 11 - RNA, 19 nt, synthetic construct
  source 1..19: mol_type = other RNA
gacccgttctctacaattt

SEQ ID NO: 12 - RNA, 19 nt, synthetic construct
  source 1..19: mol_type = other RNA
gtgccgttctctacaattt

SEQ ID NO: 13 - RNA, 19 nt, synthetic construct
  source 1..19: mol_type = other RNA
cagccgttctctacaattt

SEQ ID NO: 14 - RNA, 21 nt, synthetic construct
  source 1..21: mol_type = other RNA
ccgagccgttctctacaattt

SEQ ID NO: 15 - RNA, 21 nt, synthetic construct
  source 1..21: mol_type = other RNA
cgagccgttctctacaattat

SEQ ID NO: 16 - RNA, 21 nt, synthetic construct
  source 1..21: mol_type = other RNA
cgagccgttctctacaattaa

SEQ ID NO: 17 - RNA, 21 nt, synthetic construct
  source 1..21: mol_type = other RNA
cgagccgttctctacaattat

SEQ ID NO: 18 - RNA, 19 nt, synthetic construct
  source 1..19: mol_type = other RNA
agccgttctctacaattat

SEQ ID NO: 19 - RNA, 21 nt, synthetic construct
  source 1..21: mol_type = other RNA
cgaggcgttctctacaattat

SEQ ID NO: 20 - RNA, 21 nt, synthetic construct
  source 1..21: mol_type = other RNA
cgacccgttctctacaattat

SEQ ID NO: 21 - RNA, 21 nt, synthetic construct
  source 1..21: mol_type = other RNA
cgtgccgttctctacaattat

SEQ ID NO: 22 - RNA, 21 nt, synthetic construct
  source 1..21: mol_type = other RNA
cgaggcgttctctacaattat

SEQ ID NO: 23 - RNA, 21 nt, synthetic construct
  source 1..21: mol_type = other RNA
cgacccgttctctacaattat

SEQ ID NO: 24 - RNA, 21 nt, synthetic construct
  source 1..21: mol_type = other RNA
cgtgccgttctctacaattat

SEQ ID NO: 25 - RNA, 19 nt, synthetic construct
  source 1..19: mol_type = other RNA
aggcgttctctacaattat

SEQ ID NO: 26 - RNA, 19 nt, synthetic construct
  source 1..19: mol_type = other RNA
acccgttctctacaattat

SEQ ID NO: 27 - RNA, 19 nt, synthetic construct
  source 1..19: mol_type = other RNA
tgccgttctctacaattat

SEQ ID NO: 28 - RNA, 21 nt, synthetic construct
  source 1..21: mol_type = other RNA
cgagccgttctctacaattat

SEQ ID NO: 29 - RNA, 21 nt, synthetic construct
  source 1..21: mol_type = other RNA
gagccgttctctacaattact

SEQ ID NO: 30 - RNA, 21 nt, synthetic construct
  source 1..21: mol_type = other RNA
gagccgttctctacaattact

SEQ ID NO: 31 - RNA, 21 nt, synthetic construct
  source 1..21: mol_type = other RNA
gagccgttctctacaattact

SEQ ID NO: 32 - RNA, 21 nt, synthetic construct
  source 1..21: mol_type = other RNA
gagccgttctctacaattact

SEQ ID NO: 33 - RNA, 21 nt, synthetic construct
  source 1..21: mol_type = other RNA
gagccgttctctacaattact

SEQ ID NO: 34 - RNA, 21 nt, synthetic construct
  source 1..21: mol_type = other RNA
gagccgttctctacaattact

SEQ ID NO: 35 - RNA, 21 nt, synthetic construct
  source 1..21: mol_type = other RNA
gagccgttctctacaattact

SEQ ID NO: 36 - RNA, 21 nt, synthetic construct
  source 1..21: mol_type = other RNA
gagccgttctctacaattact

SEQ ID NO: 37 - RNA, 21 nt, synthetic construct
  source 1..21: mol_type = other RNA
gagccgttctctacaattact

SEQ ID NO: 38 - RNA, 21 nt, synthetic construct
  source 1..21: mol_type = other RNA
gagccgttctctacaattact

SEQ ID NO: 39 - RNA, 21 nt, synthetic construct
  source 1..21: mol_type = other RNA
gagccgttctctacaattact

SEQ ID NO: 40 - RNA, 21 nt, synthetic construct
  source 1..21: mol_type = other RNA
gagccgttctctacatttact

SEQ ID NO: 41 - RNA, 21 nt, synthetic construct
  source 1..21: mol_type = other RNA
gagccgttctctactattact

SEQ ID NO: 42 - RNA, 21 nt, synthetic construct
  source 1..21: mol_type = other RNA
gagccgttctctataattact

SEQ ID NO: 43 - RNA, 21 nt, synthetic construct
  source 1..21: mol_type = other RNA
gagccgttgtctacaattact

SEQ ID NO: 44 - RNA, 21 nt, synthetic construct
  source 1..21: mol_type = other RNA
gagccgtactctacaattact

SEQ ID NO: 45 - RNA, 21 nt, synthetic construct
  source 1..21: mol_type = other RNA
gagccgatctctacaattact

SEQ ID NO: 46 - RNA, 21 nt, synthetic construct
  source 1..21: mol_type = other RNA
gagcccttctctacaattact

SEQ ID NO: 47 - RNA, 21 nt, synthetic construct
  source 1..21: mol_type = other RNA
gagccgttctctacaattact

SEQ ID NO: 48 - RNA, 21 nt, synthetic construct
  source 1..21: mol_type = other RNA
gagccgttctctacaattaca

SEQ ID NO: 49 - RNA, 21 nt, synthetic construct
  source 1..21: mol_type = other RNA
gagcggttctctacaattact

SEQ ID NO: 50 - RNA, 21 nt, synthetic construct
  source 1..21: mol_type = other RNA
gaggcgttctctacaattact

SEQ ID NO: 51 - RNA, 21 nt, synthetic construct
  source 1..21: mol_type = other RNA
gacccgttctctacaattact

SEQ ID NO: 52 - RNA, 21 nt, synthetic construct
  source 1..21: mol_type = other RNA
gagccgttctctacaattact

SEQ ID NO: 53 - RNA, 21 nt, synthetic construct
  source 1..21: mol_type = other RNA
gagccgttctctacaattact

SEQ ID NO: 54 - RNA, 21 nt, synthetic construct
  source 1..21: mol_type = other RNA
gagccgttctctacaattaca

SEQ ID NO: 55 - RNA, 21 nt, synthetic construct
  source 1..21: mol_type = other RNA
gagccgttctctacaattact

SEQ ID NO: 56 - RNA, 21 nt, synthetic construct
  source 1..21: mol_type = other RNA
gagccgttctctacaattact

SEQ ID NO: 57 - RNA, 21 nt, synthetic construct
  source 1..21: mol_type = other RNA
gagccgttctctacaattact

SEQ ID NO: 58 - RNA, 21 nt, synthetic construct
  source 1..21: mol_type = other RNA
gagccgttctctacaattact

SEQ ID NO: 59 - RNA, 21 nt, synthetic construct
  source 1..21: mol_type = other RNA
gagaaattctactacatctat

SEQ ID NO: 60 - RNA, 21 nt, synthetic construct
  source 1..21: mol_type = other RNA
gagaaattctactacatctaa

SEQ ID NO: 61 - RNA, 21 nt, synthetic construct
  source 1..21: mol_type = other RNA
gagaaattctactacatctat

SEQ ID NO: 62 - RNA, 19 nt, synthetic construct
  source 1..19: mol_type = other RNA
gaaattctactacatctat

SEQ ID NO: 63 - RNA, 21 nt, synthetic construct
  source 1..21: mol_type = other RNA
gagatattctactacatctat

SEQ ID NO: 64 - RNA, 21 nt, synthetic construct
  source 1..21: mol_type = other RNA
gagtaattctactacatctat

SEQ ID NO: 65 - RNA, 21 nt, synthetic construct
  source 1..21: mol_type = other RNA
gacaaattctactacatctat

SEQ ID NO: 66 - RNA, 21 nt, synthetic construct
  source 1..21: mol_type = other RNA
gagaaattctactacatctat

SEQ ID NO: 67 - RNA, 21 nt, synthetic construct
  source 1..21: mol_type = other RNA
gagaaattctactacatctat

SEQ ID NO: 68 - RNA, 21 nt, synthetic construct
  source 1..21: mol_type = other RNA
agaaattctactacatctatt

SEQ ID NO: 69 - RNA, 21 nt, synthetic construct
  source 1..21: mol_type = other RNA
agaaattctactacatctatt

SEQ ID NO: 70 - RNA, 21 nt, synthetic construct
  source 1..21: mol_type = other RNA
agaaattctactacatctata

SEQ ID NO: 71 - RNA, 21 nt, synthetic construct
  source 1..21: mol_type = other RNA
agaaattctactacatctata

SEQ ID NO: 72 - RNA, 21 nt, synthetic construct
  source 1..21: mol_type = other RNA
agaaattctactacatctatt

SEQ ID NO: 73 - RNA, 21 nt, synthetic construct
  source 1..21: mol_type = other RNA
agaaattctactacatctatt

SEQ ID NO: 74 - RNA, 19 nt, synthetic construct
  source 1..19: mol_type = other RNA
aaattctactacatctatt

SEQ ID NO: 75 - RNA, 19 nt, synthetic construct
  source 1..19: mol_type = other RNA
aaattctactacatctatt

SEQ ID NO: 76 - RNA, 21 nt, synthetic construct
  source 1..21: mol_type = other RNA
agaatttctactacatctatt

SEQ ID NO: 77 - RNA, 21 nt, synthetic construct
  source 1..21: mol_type = other RNA
agatattctactacatctatt

SEQ ID NO: 78 - RNA, 21 nt, synthetic construct
  source 1..21: mol_type = other RNA
agtaattctactacatctatt

SEQ ID NO: 79 - RNA, 21 nt, synthetic construct
  source 1..21: mol_type = other RNA
agaatttctactacatctatt

SEQ ID NO: 80 - RNA, 21 nt, synthetic construct
  source 1..21: mol_type = other RNA
agatattctactacatctatt

SEQ ID NO: 81 - RNA, 21 nt, synthetic construct
  source 1..21: mol_type = other RNA
agtaattctactacatctatt

SEQ ID NO: 82 - RNA, 19 nt, synthetic construct
  source 1..19: mol_type = other RNA
aatttctactacatctatt

SEQ ID NO: 83 - RNA, 19 nt, synthetic construct
  source 1..19: mol_type = other RNA
atattctactacatctatt

SEQ ID NO: 84 - RNA, 19 nt, synthetic construct
  source 1..19: mol_type = other RNA
taattctactacatctatt

SEQ ID NO: 85 - RNA, 21 nt, synthetic construct
  source 1..21: mol_type = other RNA
agaaattctactacatctatt

SEQ ID NO: 86 - RNA, 21 nt, synthetic construct
  source 1..21: mol_type = other RNA
gagaaattctactacatctat

SEQ ID NO: 87 - RNA, 21 nt, synthetic construct
  source 1..21: mol_type = other RNA
agaaattctactacatctatt

SEQ ID NO: 88 - RNA, 21 nt, synthetic construct
  source 1..21: mol_type = other RNA
ccgagccgttctctacaattt

SEQ ID NO: 89 - RNA, 21 nt, synthetic construct
  source 1..21: mol_type = other RNA
cgagccgttctctacaattat

SEQ ID NO: 90 - RNA, 21 nt, synthetic construct
  source 1..21: mol_type = other RNA
gagccgttctctacaattact

SEQ ID NO: 91 - RNA, 21 nt, synthetic construct
  source 1..21: mol_type = other RNA
  modified_base 1: mod_base = OTHER; note = 2'-O-methylcytidine-3'-phosphorothioate
  modified_base 2: mod_base = OTHER; note = 2'-O-methylcytidine-3'-phosphorothioate
  modified_base 3: mod_base = OTHER; note = 2'-O-methylguanosine-3'-phosphate
  modified_base 4: mod_base = OTHER; note = 2'-O-methyladenosine-3'-phosphate
  modified_base 5: mod_base = OTHER; note = 2'-O-methylguanosine-3'-phosphate
  modified_base 6: mod_base = OTHER; note = 2'-O-methylcytidine-3'-phosphate
  modified_base 7: mod_base = OTHER; note = 2'-O-methylcytidine-3'-phosphate
  modified_base 8: mod_base = OTHER; note = 2'-O-methylguanosine-3'-phosphate
  modified_base 9: mod_base = OTHER; note = 2'-deoxy-2'-fluorouridine-3'-phosphate
  modified_base 10: mod_base = OTHER; note = 2'-deoxy-2'-fluorouridine-3'-phosphate
  modified_base 11: mod_base = OTHER; note = 2'-deoxy-2'-fluorocytidine-3'-phosphate
  modified_base 12: mod_base = OTHER; note = 2'-O-methyluridine-3'-phosphate
  modified_base 13: mod_base = OTHER; note = 2'-O-methylcytidine-3'-phosphate
  modified_base 14: mod_base = OTHER; note = 2'-O-methyluridine-3'-phosphate
  modified_base 15: mod_base = OTHER; note = 2'-O-methyladenosine-3'-phosphate
  modified_base 16: mod_base = OTHER; note = 2'-O-methylcytidine-3'-phosphate
  modified_base 17: mod_base = OTHER; note = 2'-O-methyladenosine-3'-phosphate
  modified_base 18: mod_base = OTHER; note = 2'-O-methyladenosine-3'-phosphate
  modified_base 19: mod_base = OTHER; note = 2'-O-methyluridine-3'-phosphate
  modified_base 20: mod_base = OTHER; note = 2'-O-methyluridine-3'-phosphate
  modified_base 21: mod_base = OTHER; note 2'-O-methyluridine-3'-phosphate-N-[tris(GalNAc-alkyl)-amido decanoyl)]-4-hydroxyprolinol (Hyp-(GalNAc-alkyl)3)
ccgagccgttctctacaattt

SEQ ID NO: 92 - RNA, 21 nt, synthetic construct
  source 1..21: mol_type = other RNA
  modified_base 1: mod_base = OTHER; note = 2'-O-methylcytidine-3'-phosphorothioate
  modified_base 2: mod_base = OTHER; note = 2'-O-methylcytidine-3'-phosphorothioate
  modified_base 3: mod_base = OTHER; note = 2'-O-methylguanosine-3'-phosphate
  modified_base 4: mod_base = OTHER; note = 2'-O-methyladenosine-3'-phosphate
  modified_base 5: mod_base = OTHER; note = 2'-O-methylguanosine-3'-phosphate
  modified_base 6: mod_base = OTHER; note = 2'-O-methylcytidine-3'-phosphate
  modified_base 7: mod_base = OTHER; note = 2'-O-methylcytidine-3'-phosphate
  modified_base 8: mod_base = OTHER; note = 2'-O-methylguanosine-3'-phosphate
  modified_base 9: mod_base = OTHER; note = 2'-deoxy-2'-fluorouridine-3'-phosphate
  modified_base 10: mod_base = OTHER; note = 2'-deoxy-2'-fluorouridine-3'-phosphate
  modified_base 11: mod_base = OTHER; note = 2'-deoxy-2'-fluorocytidine-3'-phosphate
  modified_base 12: mod_base = OTHER; note = 2'-O-methyluridine-3'-phosphate
  modified_base 13: mod_base = OTHER; note = 2'-O-methylcytidine-3'-phosphate
  modified_base 14: mod_base = OTHER; note = 2'-O-methyluridine-3'-phosphate
  modified_base 15: mod_base = OTHER; note = 2'-O-methyladenosine-3'-phosphate
  modified_base 16: mod_base = OTHER; note = 2'-O-methylcytidine-3'-phosphate
  modified_base 17: mod_base = OTHER; note = 2'-O-methyladenosine-3'-phosphate
  modified_base 18: mod_base = OTHER; note = 2'-O-methyladenosine-3'-phosphate
  modified_base 19: mod_base = OTHER; note = 2'-O-methyluridine-3'-phosphate
  modified_base 20: mod_base = OTHER; note = 2'-O-methyluridine-3'-phosphate
  modified_base 21: mod_base = OTHER; note 2'-O-methyladenosine3'-phosphate-N-[tris(GalNAc-alkyl)-amid odecanoyl)]-4-hydroxyprolinol (Hyp-(GalNAc-alkyl)3)
ccgagccgttctctacaatta

SEQ ID NO: 93 - RNA, 21 nt, synthetic construct
  source 1..21: mol_type = other RNA
  modified_base 1: mod_base = OTHER; note = 2'-O-methylcytidine-3'-phosphorothioate
  modified_base 2: mod_base = OTHER; note = 2'-O-methylcytidine-3'-phosphorothioate
  modified_base 3: mod_base = OTHER; note = 2'-O-methylguanosine-3'-phosphate
  modified_base 4: mod_base = OTHER; note = 2'-O-methyladenosine-3'-phosphate
  modified_base 5: mod_base = OTHER; note = 2'-O-methylguanosine-3'-phosphate
  modified_base 6: mod_base = OTHER; note = 2'-O-methylcytidine-3'-phosphate
  modified_base 7: mod_base = OTHER; note = 2'-O-methylcytidine-3'-phosphate
  modified_base 8: mod_base = OTHER; note = 2'-O-methylguanosine-3'-phosphate
  modified_base 9: mod_base = OTHER; note = 2'-deoxy-2'-fluorouridine-3'-phosphate
  modified_base 10: mod_base = OTHER; note = 2'-deoxy-2'-fluorouridine-3'-phosphate
  modified_base 11: mod_base = OTHER; note = 2'-deoxy-2'-fluorocytidine-3'-phosphate
  modified_base 12: mod_base = OTHER; note = 2'-O-methyluridine-3'-phosphate
  modified_base 13: mod_base = OTHER; note = 2'-O-methylcytidine-3'-phosphate
  modified_base 14: mod_base = OTHER; note = 2'-O-methyluridine-3'-phosphate
  modified_base 15: mod_base = OTHER; note = 2'-O-methyladenosine-3'-phosphate
  modified_base 16: mod_base = OTHER; note = 2'-O-methylcytidine-3'-phosphate
  modified_base 17: mod_base = OTHER; note = 2'-O-methyladenosine-3'-phosphate
  modified_base 18: mod_base = OTHER; note = 2'-O-methyladenosine-3'-phosphate
  modified_base 19: mod_base = OTHER; note = 2'-O-methyluridine-3'-phosphate
  modified_base 20: mod_base = OTHER; note = 2'-O-methyluridine-3'-phosphate
  modified_base 21: mod_base = OTHER; note 2'-O-methyluridine-3'-phosphate-N-[tris(GalNAc-alkyl)-amido decanoyl)]-4-hydroxyprolinol (Hyp-(GalNAc-alkyl)3)
ccgagccgttctctacaattt

SEQ ID NO: 94 - RNA, 19 nt, synthetic construct
  source 1..19: mol_type = other RNA
  modified_base 1: mod_base = OTHER; note = 2'-O-methylguanosine-3'-phosphorothioate
  modified_base 2: mod_base = OTHER; note = 2'-O-methyladenosine-3'-phosphorothioate
  modified_base 3: mod_base = OTHER; note = 2'-O-methylguanosine-3'-phosphate
  modified_base 4: mod_base = OTHER; note = 2'-O-methylcytidine-3'-phosphate
  modified_base 5: mod_base = OTHER; note = 2'-O-methylcytidine-3'-phosphate
  modified_base 6: mod_base = OTHER; note = 2'-O-methylguanosine-3'-phosphate
  modified_base 7: mod_base = OTHER; note = 2'-deoxy-2'-fluorouridine-3'-phosphate
  modified_base 8: mod_base = OTHER; note = 2'-deoxy-2'-fluorouridine-3'-phosphate
  modified_base 9: mod_base = OTHER; note = 2'-deoxy-2'-fluorocytidine-3'-phosphate
  modified_base 10: mod_base = OTHER; note = 2'-O-methyluridine-3'-phosphate
  modified_base 11: mod_base = OTHER; note = 2'-O-methylcytidine-3'-phosphate
  modified_base 12: mod_base = OTHER; note = 2'-O-methyluridine-3'-phosphate
  modified_base 13: mod_base = OTHER; note = 2'-O-methyladenosine-3'-phosphate
  modified_base 14: mod_base = OTHER; note = 2'-O-methylcytidine-3'-phosphate
  modified_base 15: mod_base = OTHER; note = 2'-O-methyladenosine-3'-phosphate
  modified_base 16: mod_base = OTHER; note = 2'-O-methyladenosine-3'-phosphate
  modified_base 17: mod_base = OTHER; note = 2'-O-methyluridine-3'-phosphate
  modified_base 18: mod_base = OTHER; note = 2'-O-methyluridine-3'-phosphate
  modified_base 19: mod_base = OTHER; note 2'-O-methyluridine-3'-phosphate-N-[tris(GalNAc-alkyl)-amido decanoyl)]-4-hydroxyprolinol (Hyp-(GalNAc-alkyl)3)
gagccgttctctacaattt

SEQ ID NO: 95 - RNA, 21 nt, synthetic construct
  source 1..21: mol_type = other RNA
  modified_base 1: mod_base = OTHER; note = 2'-O-methylcytidine-3'-phosphorothioate
  modified_base 2: mod_base = OTHER; note = 2'-O-methylcytidine-3'-phosphorothioate
  modified_base 3: mod_base = OTHER; note = 2'-O-methylguanosine-3'-phosphate
  modified_base 4: mod_base = OTHER; note = 2'-O-methyladenosine-3'-phosphate
  modified_base 5: mod_base = OTHER; note = 2'-O-methylcytidine-3'-phosphate
  modified_base 6: mod_base = OTHER; note = 2'-O-methylcytidine-3'-phosphate
  modified_base 7: mod_base = OTHER; note = 2'-O-methylcytidine-3'-phosphate
  modified_base 8: mod_base = OTHER; note = 2'-O-methylguanosine-3'-phosphate
  modified_base 9: mod_base = OTHER; note = 2'-deoxy-2'-fluorouridine-3'-phosphate
  modified_base 10: mod_base = OTHER; note = 2'-deoxy-2'-fluorouridine-3'-phosphate
  modified_base 11: mod_base = OTHER; note = 2'-deoxy-2'-fluorocytidine-3'-phosphate
  modified_base 12: mod_base = OTHER; note = 2'-O-methyluridine-3'-phosphate
  modified_base 13: mod_base = OTHER; note = 2'-O-methylcytidine-3'-phosphate
  modified_base 14: mod_base = OTHER; note = 2'-O-methyluridine-3'-phosphate
  modified_base 15: mod_base = OTHER; note = 2'-O-methyladenosine-3'-phosphate
  modified_base 16: mod_base = OTHER; note = 2'-O-methylcytidine-3'-phosphate
  modified_base 17: mod_base = OTHER; note = 2'-O-methyladenosine-3'-phosphate
  modified_base 18: mod_base = OTHER; note = 2'-O-methyladenosine-3'-phosphate
  modified_base 19: mod_base = OTHER; note = 2'-O-methyluridine-3'-phosphate
  modified_base 20: mod_base = OTHER; note = 2'-O-methyluridine-3'-phosphate
  modified_base 21: mod_base = OTHER; note 2'-O-methyluridine-3'-phosphate-N-[tris(GalNAc-alkyl)-amido decanoyl)]-4-hydroxyprolinol (Hyp-(GalNAc-alkyl)3)
ccgacccgttctctacaattt

SEQ ID NO: 96 - RNA, 21 nt, synthetic construct
  source 1..21: mol_type = other RNA
  modified_base 1: mod_base = OTHER; note = 2'-O-methylcytidine-3'-phosphorothioate
  modified_base 2: mod_base = OTHER; note = 2'-O-methylcytidine-3'-phosphorothioate
  modified_base 3: mod_base = OTHER; note = 2'-O-methylguanosine-3'-phosphate
  modified_base 4: mod_base = OTHER; note = 2'-O-methyluridine-3'-phosphate
  modified_base 5: mod_base = OTHER; note = 2'-O-methylguanosine-3'-phosphate
  modified_base 6: mod_base = OTHER; note = 2'-O-methylcytidine-3'-phosphate
  modified_base 7: mod_base = OTHER; note = 2'-O-methylcytidine-3'-phosphate
  modified_base 8: mod_base = OTHER; note = 2'-O-methylguanosine-3'-phosphate
  modified_base 9: mod_base = OTHER; note = 2'-deoxy-2'-fluorouridine-3'-phosphate
  modified_base 10: mod_base = OTHER; note = 2'-deoxy-2'-fluorouridine-3'-phosphate
  modified_base 11: mod_base = OTHER; note = 2'-deoxy-2'-fluorocytidine-3'-phosphate
  modified_base 12: mod_base = OTHER; note = 2'-O-methyluridine-3'-phosphate
  modified_base 13: mod_base = OTHER; note = 2'-O-methylcytidine-3'-phosphate
  modified_base 14: mod_base = OTHER; note = 2'-O-methyluridine-3'-phosphate
  modified_base 15: mod_base = OTHER; note = 2'-O-methyladenosine-3'-phosphate
  modified_base 16: mod_base = OTHER; note = 2'-O-methylcytidine-3'-phosphate
  modified_base 17: mod_base = OTHER; note = 2'-O-methyladenosine-3'-phosphate
  modified_base 18: mod_base = OTHER; note = 2'-O-methyladenosine-3'-phosphate
  modified_base 19: mod_base = OTHER; note = 2'-O-methyluridine-3'-phosphate
  modified_base 20: mod_base = OTHER; note = 2'-O-methyluridine-3'-phosphate
  modified_base 21: mod_base = OTHER; note 2'-O-methyluridine-3'-phosphate-N-[tris(GalNAc-alkyl)-amido decanoyl)]-4-hydroxyprolinol (Hyp-(GalNAc-alkyl)3)
ccgtgccgttctctacaattt

SEQ ID NO: 97 - RNA, 21 nt, synthetic construct
  source 1..21: mol_type = other RNA
  modified_base 1: mod_base = OTHER; note = 2'-O-methylcytidine-3'-phosphorothioate
  modified_base 2: mod_base = OTHER; note = 2'-O-methylcytidine-3'-phosphorothioate
  modified_base 3: mod_base = OTHER; note = 2'-O-methylcytidine-3'-phosphate
  modified_base 4: mod_base = OTHER; note = 2'-O-methyladenosine-3'-phosphate
  modified_base 5: mod_base = OTHER; note = 2'-O-methylguanosine-3'-phosphate
  modified_base 6: mod_base = OTHER; note = 2'-O-methylcytidine-3'-phosphate
  modified_base 7: mod_base = OTHER; note = 2'-O-methylcytidine-3'-phosphate
  modified_base 8: mod_base = OTHER; note = 2'-O-methylguanosine-3'-phosphate
  modified_base 9: mod_base = OTHER; note = 2'-deoxy-2'-fluorouridine-3'-phosphate
  modified_base 10: mod_base = OTHER; note = 2'-deoxy-2'-fluorouridine-3'-phosphate
  modified_base 11: mod_base = OTHER; note = 2'-deoxy-2'-fluorocytidine-3'-phosphate
  modified_base 12: mod_base = OTHER; note = 2'-O-methyluridine-3'-phosphate
  modified_base 13: mod_base = OTHER; note = 2'-O-methylcytidine-3'-phosphate
  modified_base 14: mod_base = OTHER; note = 2'-O-methyluridine-3'-phosphate
  modified_base 15: mod_base = OTHER; note = 2'-O-methyladenosine-3'-phosphate
  modified_base 16: mod_base = OTHER; note = 2'-O-methylcytidine-3'-phosphate
  modified_base 17: mod_base = OTHER; note = 2'-O-methyladenosine-3'-phosphate
  modified_base 18: mod_base = OTHER; note = 2'-O-methyladenosine-3'-phosphate
  modified_base 19: mod_base = OTHER; note = 2'-O-methyluridine-3'-phosphate
  modified_base 20: mod_base = OTHER; note = 2'-O-methyluridine-3'-phosphate
  modified_base 21: mod_base = OTHER; note 2'-O-methyluridine-3'-phosphate-N-[tris(GalNAc-alkyl)-amido decanoyl)]-4-hydroxyprolinol (Hyp-(GalNAc-alkyl)3)
cccagccgttctctacaattt

SEQ ID NO: 98 - RNA, 21 nt, synthetic construct
  source 1..21: mol_type = other RNA
  modified_base 1: mod_base = OTHER; note = 2'-O-methylcytidine-3'-phosphorothioate
  modified_base 2: mod_base = OTHER; note = 2'-O-methylcytidine-3'-phosphorothioate
  modified_base 3: mod_base = OTHER; note = 2'-O-methylguanosine-3'-phosphate
  modified_base 4: mod_base = OTHER; note = 2'-O-methyladenosine-3'-phosphate
  modified_base 5: mod_base = OTHER; note = 2'-O-methylcytidine-3'-phosphate
  modified_base 6: mod_base = OTHER; note = 2'-O-methylcytidine-3'-phosphate
  modified_base 7: mod_base = OTHER; note = 2'-O-methylcytidine-3'-phosphate
  modified_base 8: mod_base = OTHER; note = 2'-O-methylguanosine-3'-phosphate
  modified_base 9: mod_base = OTHER; note = 2'-deoxy-2'-fluorouridine-3'-phosphate
  modified_base 10: mod_base = OTHER; note = 2'-deoxy-2'-fluorouridine-3'-phosphate
  modified_base 11: mod_base = OTHER; note = 2'-deoxy-2'-fluorocytidine-3'-phosphate
  modified_base 12: mod_base = OTHER; note = 2'-O-methyluridine-3'-phosphate
  modified_base 13: mod_base = OTHER; note = 2'-O-methylcytidine-3'-phosphate
  modified_base 14: mod_base = OTHER; note = 2'-O-methyluridine-3'-phosphate
  modified_base 15: mod_base = OTHER; note = 2'-O-methyladenosine-3'-phosphate
  modified_base 16: mod_base = OTHER; note = 2'-O-methylcytidine-3'-phosphate
  modified_base 17: mod_base = OTHER; note = 2'-O-methyladenosine-3'-phosphate
  modified_base 18: mod_base = OTHER; note = 2'-O-methyladenosine-3'-phosphate
  modified_base 19: mod_base = OTHER; note = 2'-O-methyluridine-3'-phosphate
  modified_base 20: mod_base = OTHER; note = 2'-O-methyluridine-3'-phosphate
  modified_base 21: mod_base = OTHER; note 2'-O-methyluridine-3'-phosphate-N-[tris(GalNAc-alkyl)-amido decanoyl)]-4-hydroxyprolinol (Hyp-(GalNAc-alkyl)3)
ccgacccgttctctacaattt

SEQ ID NO: 99 - RNA, 21 nt, synthetic construct
  source 1..21: mol_type = other RNA
  modified_base 1: mod_base = OTHER; note = 2'-O-methylcytidine-3'-phosphorothioate
  modified_base 2: mod_base = OTHER; note = 2'-O-methylcytidine-3'-phosphorothioate
  modified_base 3: mod_base = OTHER; note = 2'-O-methylguanosine-3'-phosphate
  modified_base 4: mod_base = OTHER; note = 2'-O-methyluridine-3'-phosphate
  modified_base 5: mod_base = OTHER; note = 2'-O-methylguanosine-3'-phosphate
  modified_base 6: mod_base = OTHER; note = 2'-O-methylcytidine-3'-phosphate
  modified_base 7: mod_base = OTHER; note = 2'-O-methylcytidine-3'-phosphate
  modified_base 8: mod_base = OTHER; note = 2'-O-methylguanosine-3'-phosphate
  modified_base 9: mod_base = OTHER; note = 2'-deoxy-2'-fluorouridine-3'-phosphate
  modified_base 10: mod_base = OTHER; note = 2'-deoxy-2'-fluorouridine-3'-phosphate
  modified_base 11: mod_base = OTHER; note = 2'-deoxy-2'-fluorocytidine-3'-phosphate
  modified_base 12: mod_base = OTHER; note = 2'-O-methyluridine-3'-phosphate
  modified_base 13: mod_base = OTHER; note = 2'-O-methylcytidine-3'-phosphate
  modified_base 14: mod_base = OTHER; note = 2'-O-methyluridine-3'-phosphate
  modified_base 15: mod_base = OTHER; note = 2'-O-methyladenosine-3'-phosphate
  modified_base 16: mod_base = OTHER; note = 2'-O-methylcytidine-3'-phosphate
  modified_base 17: mod_base = OTHER; note = 2'-O-methyladenosine-3'-phosphate
  modified_base 18: mod_base = OTHER; note = 2'-O-methyladenosine-3'-phosphate
  modified_base 19: mod_base = OTHER; note = 2'-O-methyluridine-3'-phosphate
  modified_base 20: mod_base = OTHER; note = 2'-O-methyluridine-3'-phosphate
  modified_base 21: mod_base = OTHER; note 2'-O-methyluridine-3'-phosphate-N-[tris(GalNAc-alkyl)-amido decanoyl)]-4-hydroxyprolinol (Hyp-(GalNAc-alkyl)3)
ccgtgccgttctctacaattt

SEQ ID NO: 100 - RNA, 21 nt, synthetic construct
  source 1..21: mol_type = other RNA
  modified_base 1: mod_base = OTHER; note = 2'-O-methylcytidine-3'-phosphorothioate
  modified_base 2: mod_base = OTHER; note = 2'-O-methylcytidine-3'-phosphorothioate
  modified_base 3: mod_base = OTHER; note = 2'-O-methylcytidine-3'-phosphate
  modified_base 4: mod_base = OTHER; note = 2'-O-methyladenosine-3'-phosphate
  modified_base 5: mod_base = OTHER; note = 2'-O-methylguanosine-3'-phosphate
  modified_base 6: mod_base = OTHER; note = 2'-O-methylcytidine-3'-phosphate
  modified_base 7: mod_base = OTHER; note = 2'-O-methylcytidine-3'-phosphate
  modified_base 8: mod_base = OTHER; note = 2'-O-methylguanosine-3'-phosphate
  modified_base 9: mod_base = OTHER; note = 2'-deoxy-2'-fluorouridine-3'-phosphate
  modified_base 10: mod_base = OTHER; note = 2'-deoxy-2'-fluorouridine-3'-phosphate
  modified_base 11: mod_base = OTHER; note = 2'-deoxy-2'-fluorocytidine-3'-phosphate
  modified_base 12: mod_base = OTHER; note = 2'-O-methyluridine-3'-phosphate
  modified_base 13: mod_base = OTHER; note = 2'-O-methylcytidine-3'-phosphate
  modified_base 14: mod_base = OTHER; note = 2'-O-methyluridine-3'-phosphate
  modified_base 15: mod_base = OTHER; note = 2'-O-methyladenosine-3'-phosphate
  modified_base 16: mod_base = OTHER; note = 2'-O-methylcytidine-3'-phosphate
  modified_base 17: mod_base = OTHER; note = 2'-O-methyladenosine-3'-phosphate
  modified_base 18: mod_base = OTHER; note = 2'-O-methyladenosine-3'-phosphate
  modified_base 19: mod_base = OTHER; note = 2'-O-methyluridine-3'-phosphate
  modified_base 20: mod_base = OTHER; note = 2'-O-methyluridine-3'-phosphate
  modified_base 21: mod_base = OTHER; note 2'-O-methyluridine-3'-phosphate-N-[tris(GalNAc-alkyl)-amido decanoyl)]-4-hydroxyprolinol (Hyp-(GalNAc-alkyl)3)
cccagccgttctctacaattt

SEQ ID NO: 101 - RNA, 19 nt, synthetic construct
  source 1..19: mol_type = other RNA
  modified_base 1: mod_base = OTHER; note = 2'-O-methylguanosine-3'-phosphorothioate
  modified_base 2: mod_base = OTHER; note = 2'-O-methyladenosine-3'-phosphorothioate
  modified_base 3: mod_base = OTHER; note = 2'-O-methylcytidine-3'-phosphate
  modified_base 4: mod_base = OTHER; note = 2'-O-methylcytidine-3'-phosphate
  modified_base 5: mod_base = OTHER; note = 2'-O-methylcytidine-3'-phosphate
  modified_base 6: mod_base = OTHER; note = 2'-O-methylguanosine-3'-phosphate
  modified_base 7: mod_base = OTHER; note = 2'-deoxy-2'-fluorouridine-3'-phosphate
  modified_base 8: mod_base = OTHER; note = 2'-deoxy-2'-fluorouridine-3'-phosphate
  modified_base 9: mod_base = OTHER; note = 2'-deoxy-2'-fluorocytidine-3'-phosphate
  modified_base 10: mod_base = OTHER; note = 2'-O-methyluridine-3'-phosphate
  modified_base 11: mod_base = OTHER; note = 2'-O-methylcytidine-3'-phosphate
  modified_base 12: mod_base = OTHER; note = 2'-O-methyluridine-3'-phosphate
  modified_base 13: mod_base = OTHER; note = 2'-O-methyladenosine-3'-phosphate
  modified_base 14: mod_base = OTHER; note = 2'-O-methylcytidine-3'-phosphate
  modified_base 15: mod_base = OTHER; note = 2'-O-methyladenosine-3'-phosphate
  modified_base 16: mod_base = OTHER; note = 2'-O-methyladenosine-3'-phosphate
  modified_base 17: mod_base = OTHER; note = 2'-O-methyluridine-3'-phosphate
  modified_base 18: mod_base = OTHER; note = 2'-O-methyluridine-3'-phosphate
  modified_base 19: mod_base = OTHER; note 2'-O-methyluridine-3'-phosphate-N-[tris(GalNAc-alkyl)-amido decanoyl)]-4-hydroxyprolinol (Hyp-(GalNAc-alkyl)3)
gacccgttctctacaattt

SEQ ID NO: 102 - RNA, 19 nt, synthetic construct
  source 1..19: mol_type = other RNA
  modified_base 1: mod_base = OTHER; note = 2'-O-methylguanosine-3'-phosphorothioate
  modified_base 2: mod_base = OTHER; note = 2'-O-methyluridine-3'-phosphorothioate
  modified_base 3: mod_base = OTHER; note = 2'-O-methylguanosine-3'-phosphate
  modified_base 4: mod_base = OTHER; note = 2'-O-methylcytidine-3'-phosphate
  modified_base 5: mod_base = OTHER; note = 2'-O-methylcytidine-3'-phosphate
  modified_base 6: mod_base = OTHER; note = 2'-O-methylguanosine-3'-phosphate
  modified_base 7: mod_base = OTHER; note = 2'-deoxy-2'-fluorouridine-3'-phosphate
  modified_base 8: mod_base = OTHER; note = 2'-deoxy-2'-fluorouridine-3'-phosphate
  modified_base 9: mod_base = OTHER; note = 2'-deoxy-2'-fluorocytidine-3'-phosphate
  modified_base 10: mod_base = OTHER; note = 2'-O-methyluridine-3'-phosphate
  modified_base 11: mod_base = OTHER; note = 2'-O-methylcytidine-3'-phosphate
  modified_base 12: mod_base = OTHER; note = 2'-O-methyluridine-3'-phosphate
  modified_base 13: mod_base = OTHER; note = 2'-O-methyladenosine-3'-phosphate
  modified_base 14: mod_base = OTHER; note = 2'-O-methylcytidine-3'-phosphate
  modified_base 15: mod_base = OTHER; note = 2'-O-methyladenosine-3'-phosphate
  modified_base 16: mod_base = OTHER; note = 2'-O-methyladenosine-3'-phosphate
  modified_base 17: mod_base = OTHER; note = 2'-O-methyluridine-3'-phosphate
  modified_base 18: mod_base = OTHER; note = 2'-O-methyluridine-3'-phosphate
  modified_base 19: mod_base = OTHER; note 2'-O-methyluridine-3'-phosphate-N-[tris(GalNAc-alkyl)-amido decanoyl)]-4-hydroxyprolinol (Hyp-(GalNAc-alkyl)3)
gtgccgttctctacaattt

SEQ ID NO: 103 - RNA, 19 nt, synthetic construct
  source 1..19: mol_type = other RNA
  modified_base 1: mod_base = OTHER; note = 2'-O-methylcytidine-3'-phosphorothioate
  modified_base 2: mod_base = OTHER; note = 2'-O-methyladenosine-3'-phosphorothioate
  modified_base 3: mod_base = OTHER; note = 2'-O-methylguanosine-3'-phosphate
  modified_base 4: mod_base = OTHER; note = 2'-O-methylcytidine-3'-phosphate
  modified_base 5: mod_base = OTHER; note = 2'-O-methylcytidine-3'-phosphate
  modified_base 6: mod_base = OTHER; note = 2'-O-methylguanosine-3'-phosphate
  modified_base 7: mod_base = OTHER; note = 2'-deoxy-2'-fluorouridine-3'-phosphate
  modified_base 8: mod_base = OTHER; note = 2'-deoxy-2'-fluorouridine-3'-phosphate
  modified_base 9: mod_base = OTHER; note = 2'-deoxy-2'-fluorocytidine-3'-phosphate
  modified_base 10: mod_base = OTHER; note = 2'-O-methyluridine-3'-phosphate
  modified_base 11: mod_base = OTHER; note = 2'-O-methylcytidine-3'-phosphate
  modified_base 12: mod_base = OTHER; note = 2'-O-methyluridine-3'-phosphate
  modified_base 13: mod_base = OTHER; note = 2'-O-methyladenosine-3'-phosphate
  modified_base 14: mod_base = OTHER; note = 2'-O-methylcytidine-3'-phosphate
  modified_base 15: mod_base = OTHER; note = 2'-O-methyladenosine-3'-phosphate
  modified_base 16: mod_base = OTHER; note = 2'-O-methyladenosine-3'-phosphate
  modified_base 17: mod_base = OTHER; note = 2'-O-methyluridine-3'-phosphate
  modified_base 18: mod_base = OTHER; note = 2'-O-methyluridine-3'-phosphate
  modified_base 19: mod_base = OTHER; note 2'-O-methyluridine-3'-phosphate-N-[tris(GalNAc-alkyl)-amido decanoyl)]-4-hydroxyprolinol (Hyp-(GalNAc-alkyl)3)
cagccgttctctacaattt

SEQ ID NO: 104 - RNA, 21 nt, synthetic construct
  source 1..21: mol_type = other RNA
  modified_base 1: mod_base = OTHER; note = 2'-O-methylcytidine-3'-phosphorothioate
  modified_base 2: mod_base = OTHER; note = 2'-O-methylcytidine-3'-phosphorothioate
  modified_base 3: mod_base = OTHER; note = 2'-O-methylguanosine-3'-phosphate
  modified_base 4: mod_base = OTHER; note = 2'-O-methyladenosine-3'-phosphate
  modified_base 5: mod_base = OTHER; note = 2'-O-methylguanosine-3'-phosphate
  modified_base 6: mod_base = OTHER; note = 2'-O-methylcytidine-3'-phosphate
  modified_base 7: mod_base = OTHER; note = 2'-O-methylcytidine-3'-phosphate
  modified_base 8: mod_base = OTHER; note = 2'-O-methylguanosine-3'-phosphate
  modified_base 9: mod_base = OTHER; note = 2'-deoxy-2'-fluorouridine-3'-phosphate
  modified_base 10: mod_base = OTHER; note = 2'-deoxy-2'-fluorouridine-3'-phosphate
  modified_base 11: mod_base = OTHER; note = 2'-deoxy-2'-fluorocytidine-3'-phosphate
  modified_base 12: mod_base = OTHER; note = 2'-O-methyluridine-3'-phosphate
  modified_base 13: mod_base = OTHER; note = 2'-O-methylcytidine-3'-phosphate
  modified_base 14: mod_base = OTHER; note = 2'-O-methyluridine-3'-phosphate
  modified_base 15: mod_base = OTHER; note = 2'-O-methyladenosine-3'-phosphate
  modified_base 16: mod_base = OTHER; note = 2'-O-methylcytidine-3'-phosphate
  modified_base 17: mod_base = OTHER; note = 2'-O-methyladenosine-3'-phosphate
  modified_base 18: mod_base = OTHER; note = 2'-O-methyladenosine-3'-phosphate
  modified_base 19: mod_base = OTHER; note = 2'-O-methyluridine-3'-phosphate
  modified_base 20: mod_base = OTHER; note = 2'-O-methyluridine-3'-phosphate
  modified_base 21: mod_base = OTHER; note 2'-O-methyluridine-3'-phosphate-N-[tris(GalNAc-alkyl)-amido decanoyl)]-4-hydroxyprolinol (Hyp-(GalNAc-alkyl)3)
ccgagccgttctctacaattt

SEQ ID NO: 105 - RNA, 21 nt, synthetic construct
  source 1..21: mol_type = other RNA
  modified_base 1: mod_base = OTHER; note = 2'-O-methylcytidine-3'-phosphorothioate
  modified_base 2: mod_base = OTHER; note = 2'-O-methylguanosine-3'-phosphorothioate
  modified_base 3: mod_base = OTHER; note = 2'-O-methyladenosine-3'-phosphate
  modified_base 4: mod_base = OTHER; note = 2'-O-methylguanosine-3'-phosphate
  modified_base 5: mod_base = OTHER; note = 2'-O-methylcytidine-3'-phosphate
  modified_base 6: mod_base = OTHER; note = 2'-O-methylcytidine-3'-phosphate
  modified_base 7: mod_base = OTHER; note = 2'-O-methylguanosine-3'-phosphate
  modified_base 8: mod_base = OTHER; note = 2'-O-methyluridine-3'-phosphate
  modified_base 9: mod_base = OTHER; note = 2'-deoxy-2'-fluorouridine-3'-phosphate
  modified_base 10: mod_base = OTHER; note = 2'-deoxy-2'-fluorocytidine-3'-phosphate
  modified_base 11: mod_base = OTHER; note = 2'-deoxy-2'-fluorouridine-3'-phosphate
  modified_base 12: mod_base = OTHER; note = 2'-O-methylcytidine-3'-phosphate
  modified_base 13: mod_base = OTHER; note = 2'-O-methyluridine-3'-phosphate
  modified_base 14: mod_base = OTHER; note = 2'-O-methyladenosine-3'-phosphate
  modified_base 15: mod_base = OTHER; note = 2'-O-methylcytidine-3'-phosphate
  modified_base 16: mod_base = OTHER; note = 2'-O-methyladenosine-3'-phosphate
  modified_base 17: mod_base = OTHER; note = 2'-O-methyladenosine-3'-phosphate
  modified_base 18: mod_base = OTHER; note = 2'-O-methyluridine-3'-phosphate
  modified_base 19: mod_base = OTHER; note = 2'-O-methyluridine-3'-phosphate
  modified_base 20: mod_base = OTHER; note = 2'-O-methyladenosine-3'-phosphate
  modified_base 21: mod_base = OTHER; note 2'-O-methyluridine-3'-phosphate-N-[tris(GalNAc-alkyl)-amido decanoyl)]-4-hydroxyprolinol (Hyp-(GalNAc-alkyl)3)
cgagccgttctctacaattat

SEQ ID NO: 106 - RNA, 21 nt, synthetic construct
  source 1..21: mol_type = other RNA
  modified_base 1: mod_base = OTHER; note = 2'-O-methylcytidine-3'-phosphorothioate
  modified_base 2: mod_base = OTHER; note = 2'-O-methylguanosine-3'-phosphorothioate
  modified_base 3: mod_base = OTHER; note = 2'-O-methyladenosine-3'-phosphate
  modified_base 4: mod_base = OTHER; note = 2'-O-methylguanosine-3'-phosphate
  modified_base 5: mod_base = OTHER; note = 2'-O-methylcytidine-3'-phosphate
  modified_base 6: mod_base = OTHER; note = 2'-O-methylcytidine-3'-phosphate
  modified_base 7: mod_base = OTHER; note = 2'-O-methylguanosine-3'-phosphate
  modified_base 8: mod_base = OTHER; note = 2'-O-methyluridine-3'-phosphate
  modified_base 9: mod_base = OTHER; note = 2'-deoxy-2'-fluorouridine-3'-phosphate
  modified_base 10: mod_base = OTHER; note = 2'-deoxy-2'-fluorocytidine-3'-phosphate
  modified_base 11: mod_base = OTHER; note = 2'-deoxy-2'-fluorouridine-3'-phosphate
  modified_base 12: mod_base = OTHER; note = 2'-O-methylcytidine-3'-phosphate
  modified_base 13: mod_base = OTHER; note = 2'-O-methyluridine-3'-phosphate
  modified_base 14: mod_base = OTHER; note = 2'-O-methyladenosine-3'-phosphate
  modified_base 15: mod_base = OTHER; note = 2'-O-methylcytidine-3'-phosphate
  modified_base 16: mod_base = OTHER; note = 2'-O-methyladenosine-3'-phosphate
  modified_base 17: mod_base = OTHER; note = 2'-O-methyladenosine-3'-phosphate
  modified_base 18: mod_base = OTHER; note = 2'-O-methyluridine-3'-phosphate
  modified_base 19: mod_base = OTHER; note = 2'-O-methyluridine-3'-phosphate
  modified_base 20: mod_base = OTHER; note = 2'-O-methyladenosine-3'-phosphate
  modified_base 21: mod_base = OTHER; note 2'-O-methyladenosine3'-phosphate-N-[tris(GalNAc-alkyl)-amid odecanoyl)]-4-hydroxyprolinol (Hyp-(GalNAc-alkyl)3)
cgagccgttctctacaattaa

SEQ ID NO: 107 - RNA, 21 nt, synthetic construct
  source 1..21: mol_type = other RNA
  modified_base 1: mod_base = OTHER; note = 2'-O-methylcytidine-3'-phosphorothioate
  modified_base 2: mod_base = OTHER; note = 2'-O-methylguanosine-3'-phosphorothioate
  modified_base 3: mod_base = OTHER; note = 2'-O-methyladenosine-3'-phosphate
  modified_base 4: mod_base = OTHER; note = 2'-O-methylguanosine-3'-phosphate
  modified_base 5: mod_base = OTHER; note = 2'-O-methylcytidine-3'-phosphate
  modified_base 6: mod_base = OTHER; note = 2'-O-methylcytidine-3'-phosphate
  modified_base 7: mod_base = OTHER; note = 2'-O-methylguanosine-3'-phosphate
  modified_base 8: mod_base = OTHER; note = 2'-O-methyluridine-3'-phosphate
  modified_base 9: mod_base = OTHER; note = 2'-deoxy-2'-fluorouridine-3'-phosphate
  modified_base 10: mod_base = OTHER; note = 2'-deoxy-2'-fluorocytidine-3'-phosphate
  modified_base 11: mod_base = OTHER; note = 2'-deoxy-2'-fluorouridine-3'-phosphate
  modified_base 12: mod_base = OTHER; note = 2'-O-methylcytidine-3'-phosphate
  modified_base 13: mod_base = OTHER; note = 2'-O-methyluridine-3'-phosphate
  modified_base 14: mod_base = OTHER; note = 2'-O-methyladenosine-3'-phosphate
  modified_base 15: mod_base = OTHER; note = 2'-O-methylcytidine-3'-phosphate
  modified_base 16: mod_base = OTHER; note = 2'-O-methyladenosine-3'-phosphate
  modified_base 17: mod_base = OTHER; note = 2'-O-methyladenosine-3'-phosphate
  modified_base 18: mod_base = OTHER; note = 2'-O-methyluridine-3'-phosphate
  modified_base 19: mod_base = OTHER; note = 2'-O-methyluridine-3'-phosphate
  modified_base 20: mod_base = OTHER; note = 2'-O-methyladenosine-3'-phosphate
  modified_base 21: mod_base = OTHER; note 2'-O-methyluridine-3'-phosphate-N-[tris(GalNAc-alkyl)-amido decanoyl)]-4-hydroxyprolinol (Hyp-(GalNAc-alkyl)3)
cgagccgttctctacaattat

SEQ ID NO: 108 - RNA, 19 nt, synthetic construct
  source 1..19: mol_type = other RNA
  modified_base 1: mod_base = OTHER; note = 2'-O-methyladenosine-3'-phosphorothioate
  modified_base 2: mod_base = OTHER; note = 2'-O-methylguanosine-3'-phosphorothioate
  modified_base 3: mod_base = OTHER; note = 2'-O-methylcytidine-3'-phosphate
  modified_base 4: mod_base = OTHER; note = 2'-O-methylcytidine-3'-phosphate
  modified_base 5: mod_base = OTHER; note = 2'-O-methylguanosine-3'-phosphate
  modified_base 6: mod_base = OTHER; note = 2'-O-methyluridine-3'-phosphate
  modified_base 7: mod_base = OTHER; note = 2'-deoxy-2'-fluorouridine-3'-phosphate
  modified_base 8: mod_base = OTHER; note = 2'-deoxy-2'-fluorocytidine-3'-phosphate
  modified_base 9: mod_base = OTHER; note = 2'-deoxy-2'-fluorouridine-3'-phosphate
  modified_base 10: mod_base = OTHER; note = 2'-O-methylcytidine-3'-phosphate
  modified_base 11: mod_base = OTHER; note = 2'-O-methyluridine-3'-phosphate
  modified_base 12: mod_base = OTHER; note = 2'-O-methyladenosine-3'-phosphate
  modified_base 13: mod_base = OTHER; note = 2'-O-methylcytidine-3'-phosphate
  modified_base 14: mod_base = OTHER; note = 2'-O-methyladenosine-3'-phosphate
  modified_base 15: mod_base = OTHER; note = 2'-O-methyladenosine-3'-phosphate
  modified_base 16: mod_base = OTHER; note = 2'-O-methyluridine-3'-phosphate
  modified_base 17: mod_base = OTHER; note = 2'-O-methyluridine-3'-phosphate
  modified_base 18: mod_base = OTHER; note = 2'-O-methyladenosine-3'-phosphate
  modified_base 19: mod_base = OTHER; note 2'-O-methyluridine-3'-phosphate-N-[tris(GalNAc-alkyl)-amido decanoyl)]-4-hydroxyprolinol (Hyp-(GalNAc-alkyl)3)
agccgttctctacaattat

SEQ ID NO: 109 - RNA, 21 nt, synthetic construct
  source 1..21: mol_type = other RNA
  modified_base 1: mod_base = OTHER; note = 2'-O-methylcytidine-3'-phosphorothioate
  modified_base 2: mod_base = OTHER; note = 2'-O-methylguanosine-3'-phosphorothioate
  modified_base 3: mod_base = OTHER; note = 2'-O-methyladenosine-3'-phosphate
  modified_base 4: mod_base = OTHER; note = 2'-O-methylguanosine-3'-phosphate
  modified_base 5: mod_base = OTHER; note = 2'-O-methylguanosine-3'-phosphate
  modified_base 6: mod_base = OTHER; note = 2'-O-methylcytidine-3'-phosphate
  modified_base 7: mod_base = OTHER; note = 2'-O-methylguanosine-3'-phosphate
  modified_base 8: mod_base = OTHER; note = 2'-O-methyluridine-3'-phosphate
  modified_base 9: mod_base = OTHER; note = 2'-deoxy-2'-fluorouridine-3'-phosphate
  modified_base 10: mod_base = OTHER; note = 2'-deoxy-2'-fluorocytidine-3'-phosphate
  modified_base 11: mod_base = OTHER; note = 2'-deoxy-2'-fluorouridine-3'-phosphate
  modified_base 12: mod_base = OTHER; note = 2'-O-methylcytidine-3'-phosphate
  modified_base 13: mod_base = OTHER; note = 2'-O-methyluridine-3'-phosphate
  modified_base 14: mod_base = OTHER; note = 2'-O-methyladenosine-3'-phosphate
  modified_base 15: mod_base = OTHER; note = 2'-O-methylcytidine-3'-phosphate
  modified_base 16: mod_base = OTHER; note = 2'-O-methyladenosine-3'-phosphate
  modified_base 17: mod_base = OTHER; note = 2'-O-methyladenosine-3'-phosphate
  modified_base 18: mod_base = OTHER; note = 2'-O-methyluridine-3'-phosphate
  modified_base 19: mod_base = OTHER; note = 2'-O-methyluridine-3'-phosphate
  modified_base 20: mod_base = OTHER; note = 2'-O-methyladenosine-3'-phosphate
  modified_base 21: mod_base = OTHER; note 2'-O-methyluridine-3'-phosphate-N-[tris(GalNAc-alkyl)-amido decanoyl)]-4-hydroxyprolinol (Hyp-(GalNAc-alkyl)3)
cgaggcgttctctacaattat

SEQ ID NO: 110 - RNA, 21 nt, synthetic construct
  source 1..21: mol_type = other RNA
  modified_base 1: mod_base = OTHER; note = 2'-O-methylcytidine-3'-phosphorothioate
  modified_base 2: mod_base = OTHER; note = 2'-O-methylguanosine-3'-phosphorothioate
  modified_base 3: mod_base = OTHER; note = 2'-O-methyladenosine-3'-phosphate
  modified_base 4: mod_base = OTHER; note = 2'-O-methylcytidine-3'-phosphate
  modified_base 5: mod_base = OTHER; note = 2'-O-methylcytidine-3'-phosphate
  modified_base 6: mod_base = OTHER; note = 2'-O-methylcytidine-3'-phosphate
  modified_base 7: mod_base = OTHER; note = 2'-O-methylguanosine-3'-phosphate
  modified_base 8: mod_base = OTHER; note = 2'-O-methyluridine-3'-phosphate
  modified_base 9: mod_base = OTHER; note = 2'-deoxy-2'-fluorouridine-3'-phosphate
  modified_base 10: mod_base = OTHER; note = 2'-deoxy-2'-fluorocytidine-3'-phosphate
  modified_base 11: mod_base = OTHER; note = 2'-deoxy-2'-fluorouridine-3'-phosphate
  modified_base 12: mod_base = OTHER; note = 2'-O-methylcytidine-3'-phosphate
  modified_base 13: mod_base = OTHER; note = 2'-O-methyluridine-3'-phosphate
  modified_base 14: mod_base = OTHER; note = 2'-O-methyladenosine-3'-phosphate
  modified_base 15: mod_base = OTHER; note = 2'-O-methylcytidine-3'-phosphate
  modified_base 16: mod_base = OTHER; note = 2'-O-methyladenosine-3'-phosphate
  modified_base 17: mod_base = OTHER; note = 2'-O-methyladenosine-3'-phosphate
  modified_base 18: mod_base = OTHER; note = 2'-O-methyluridine-3'-phosphate
  modified_base 19: mod_base = OTHER; note = 2'-O-methyluridine-3'-phosphate
  modified_base 20: mod_base = OTHER; note = 2'-O-methyladenosine-3'-phosphate
  modified_base 21: mod_base = OTHER; note 2'-O-methyluridine-3'-phosphate-N-[tris(GalNAc-alkyl)-amido decanoyl)]-4-hydroxyprolinol (Hyp-(GalNAc-alkyl)3)
cgacccgttctctacaattat

SEQ ID NO: 111 - RNA, 21 nt, synthetic construct
  source 1..21: mol_type = other RNA
  modified_base 1: mod_base = OTHER; note = 2'-O-methylcytidine-3'-phosphorothioate
  modified_base 2: mod_base = OTHER; note = 2'-O-methylguanosine-3'-phosphorothioate
  modified_base 3: mod_base = OTHER; note = 2'-O-methyluridine-3'-phosphate
  modified_base 4: mod_base = OTHER; note = 2'-O-methylguanosine-3'-phosphate
  modified_base 5: mod_base = OTHER; note = 2'-O-methylcytidine-3'-phosphate
  modified_base 6: mod_base = OTHER; note = 2'-O-methylcytidine-3'-phosphate
  modified_base 7: mod_base = OTHER; note = 2'-O-methylguanosine-3'-phosphate
  modified_base 8: mod_base = OTHER; note = 2'-O-methyluridine-3'-phosphate
  modified_base 9: mod_base = OTHER; note = 2'-deoxy-2'-fluorouridine-3'-phosphate
  modified_base 10: mod_base = OTHER; note = 2'-deoxy-2'-fluorocytidine-3'-phosphate
  modified_base 11: mod_base = OTHER; note = 2'-deoxy-2'-fluorouridine-3'-phosphate
  modified_base 12: mod_base = OTHER; note = 2'-O-methylcytidine-3'-phosphate
  modified_base 13: mod_base = OTHER; note = 2'-O-methyluridine-3'-phosphate
  modified_base 14: mod_base = OTHER; note = 2'-O-methyladenosine-3'-phosphate
  modified_base 15: mod_base = OTHER; note = 2'-O-methylcytidine-3'-phosphate
  modified_base 16: mod_base = OTHER; note = 2'-O-methyladenosine-3'-phosphate
  modified_base 17: mod_base = OTHER; note = 2'-O-methyladenosine-3'-phosphate
  modified_base 18: mod_base = OTHER; note = 2'-O-methyluridine-3'-phosphate
  modified_base 19: mod_base = OTHER; note = 2'-O-methyluridine-3'-phosphate
  modified_base 20: mod_base = OTHER; note = 2'-O-methyladenosine-3'-phosphate
  modified_base 21: mod_base = OTHER; note 2'-O-methyluridine-3'-phosphate-N-[tris(GalNAc-alkyl)-amido decanoyl)]-4-hydroxyprolinol (Hyp-(GalNAc-alkyl)3)
cgtgccgttctctacaattat

SEQ ID NO: 112 - RNA, 21 nt, synthetic construct
  source 1..21: mol_type = other RNA
  modified_base 1: mod_base = OTHER; note = 2'-O-methylcytidine-3'-phosphorothioate
  modified_base 2: mod_base = OTHER; note = 2'-O-methylguanosine-3'-phosphorothioate
  modified_base 3: mod_base = OTHER; note = 2'-O-methyladenosine-3'-phosphate
  modified_base 4: mod_base = OTHER; note = 2'-O-methylguanosine-3'-phosphate
  modified_base 5: mod_base = OTHER; note = 2'-O-methylguanosine-3'-phosphate
  modified_base 6: mod_base = OTHER; note = 2'-O-methylcytidine-3'-phosphate
  modified_base 7: mod_base = OTHER; note = 2'-O-methylguanosine-3'-phosphate
  modified_base 8: mod_base = OTHER; note = 2'-O-methyluridine-3'-phosphate
  modified_base 9: mod_base = OTHER; note = 2'-deoxy-2'-fluorouridine-3'-phosphate
  modified_base 10: mod_base = OTHER; note = 2'-deoxy-2'-fluorocytidine-3'-phosphate
  modified_base 11: mod_base = OTHER; note = 2'-deoxy-2'-fluorouridine-3'-phosphate
  modified_base 12: mod_base = OTHER; note = 2'-O-methylcytidine-3'-phosphate
  modified_base 13: mod_base = OTHER; note = 2'-O-methyluridine-3'-phosphate
  modified_base 14: mod_base = OTHER; note = 2'-O-methyladenosine-3'-phosphate
  modified_base 15: mod_base = OTHER; note = 2'-O-methylcytidine-3'-phosphate
  modified_base 16: mod_base = OTHER; note = 2'-O-methyladenosine-3'-phosphate
  modified_base 17: mod_base = OTHER; note = 2'-O-methyladenosine-3'-phosphate
  modified_base 18: mod_base = OTHER; note = 2'-O-methyluridine-3'-phosphate
  modified_base 19: mod_base = OTHER; note = 2'-O-methyluridine-3'-phosphate
  modified_base 20: mod_base = OTHER; note = 2'-O-methyladenosine-3'-phosphate
  modified_base 21: mod_base = OTHER; note 2'-O-methyluridine-3'-phosphate-N-[tris(GalNAc-alkyl)-amido decanoyl)]-4-hydroxyprolinol (Hyp-(GalNAc-alkyl)3)
cgaggcgttctctacaattat

SEQ ID NO: 113 - RNA, 21 nt, synthetic construct
  source 1..21: mol_type = other RNA
  modified_base 1: mod_base = OTHER; note = 2'-O-methylcytidine-3'-phosphorothioate
  modified_base 2: mod_base = OTHER; note = 2'-O-methylguanosine-3'-phosphorothioate
  modified_base 3: mod_base = OTHER; note = 2'-O-methyladenosine-3'-phosphate
  modified_base 4: mod_base = OTHER; note = 2'-O-methylcytidine-3'-phosphate
  modified_base 5: mod_base = OTHER; note = 2'-O-methylcytidine-3'-phosphate
  modified_base 6: mod_base = OTHER; note = 2'-O-methylcytidine-3'-phosphate
  modified_base 7: mod_base = OTHER; note = 2'-O-methylguanosine-3'-phosphate
  modified_base 8: mod_base = OTHER; note = 2'-O-methyluridine-3'-phosphate
  modified_base 9: mod_base = OTHER; note = 2'-deoxy-2'-fluorouridine-3'-phosphate
  modified_base 10: mod_base = OTHER; note = 2'-deoxy-2'-fluorocytidine-3'-phosphate
  modified_base 11: mod_base = OTHER; note = 2'-deoxy-2'-fluorouridine-3'-phosphate
  modified_base 12: mod_base = OTHER; note = 2'-O-methylcytidine-3'-phosphate
  modified_base 13: mod_base = OTHER; note = 2'-O-methyluridine-3'-phosphate
  modified_base 14: mod_base = OTHER; note = 2'-O-methyladenosine-3'-phosphate
  modified_base 15: mod_base = OTHER; note = 2'-O-methylcytidine-3'-phosphate
  modified_base 16: mod_base = OTHER; note = 2'-O-methyladenosine-3'-phosphate
  modified_base 17: mod_base = OTHER; note = 2'-O-methyladenosine-3'-phosphate
  modified_base 18: mod_base = OTHER; note = 2'-O-methyluridine-3'-phosphate
  modified_base 19: mod_base = OTHER; note = 2'-O-methyluridine-3'-phosphate
  modified_base 20: mod_base = OTHER; note = 2'-O-methyladenosine-3'-phosphate
  modified_base 21: mod_base = OTHER; note 2'-O-methyluridine-3'-phosphate-N-[tris(GalNAc-alkyl)-amido decanoyl)]-4-hydroxyprolinol (Hyp-(GalNAc-alkyl)3)
cgacccgttctctacaattat

SEQ ID NO: 114 - RNA, 21 nt, synthetic construct
  source 1..21: mol_type = other RNA
  modified_base 1: mod_base = OTHER; note = 2'-O-methylcytidine-3'-phosphorothioate
  modified_base 2: mod_base = OTHER; note = 2'-O-methylguanosine-3'-phosphorothioate
  modified_base 3: mod_base = OTHER; note = 2'-O-methyluridine-3'-phosphate
  modified_base 4: mod_base = OTHER; note = 2'-O-methylguanosine-3'-phosphate
  modified_base 5: mod_base = OTHER; note = 2'-O-methylcytidine-3'-phosphate
  modified_base 6: mod_base = OTHER; note = 2'-O-methylcytidine-3'-phosphate
  modified_base 7: mod_base = OTHER; note = 2'-O-methylguanosine-3'-phosphate
  modified_base 8: mod_base = OTHER; note = 2'-O-methyluridine-3'-phosphate
  modified_base 9: mod_base = OTHER; note = 2'-deoxy-2'-fluorouridine-3'-phosphate
  modified_base 10: mod_base = OTHER; note = 2'-deoxy-2'-fluorocytidine-3'-phosphate
  modified_base 11: mod_base = OTHER; note = 2'-deoxy-2'-fluorouridine-3'-phosphate
  modified_base 12: mod_base = OTHER; note = 2'-O-methylcytidine-3'-phosphate
  modified_base 13: mod_base = OTHER; note = 2'-O-methyluridine-3'-phosphate
  modified_base 14: mod_base = OTHER; note = 2'-O-methyladenosine-3'-phosphate
  modified_base 15: mod_base = OTHER; note = 2'-O-methylcytidine-3'-phosphate
  modified_base 16: mod_base = OTHER; note = 2'-O-methyladenosine-3'-phosphate
  modified_base 17: mod_base = OTHER; note = 2'-O-methyladenosine-3'-phosphate
  modified_base 18: mod_base = OTHER; note = 2'-O-methyluridine-3'-phosphate
  modified_base 19: mod_base = OTHER; note = 2'-O-methyluridine-3'-phosphate
  modified_base 20: mod_base = OTHER; note = 2'-O-methyladenosine-3'-phosphate
  modified_base 21: mod_base = OTHER; note 2'-O-methyluridine-3'-phosphate-N-[tris(GalNAc-alkyl)-amido decanoyl)]-4-hydroxyprolinol (Hyp-(GalNAc-alkyl)3)
cgtgccgttctctacaattat

SEQ ID NO: 115 - RNA, 19 nt, synthetic construct
  source 1..19: mol_type = other RNA
  modified_base 1: mod_base = OTHER; note = 2'-O-methyladenosine-3'-phosphorothioate
  modified_base 2: mod_base = OTHER; note = 2'-O-methylguanosine-3'-phosphorothioate
  modified_base 3: mod_base = OTHER; note = 2'-O-methylguanosine-3'-phosphate
  modified_base 4: mod_base = OTHER; note = 2'-O-methylcytidine-3'-phosphate
  modified_base 5: mod_base = OTHER; note = 2'-O-methylguanosine-3'-phosphate
  modified_base 6: mod_base = OTHER; note = 2'-O-methyluridine-3'-phosphate
  modified_base 7: mod_base = OTHER; note = 2'-deoxy-2'-fluorouridine-3'-phosphate
  modified_base 8: mod_base = OTHER; note = 2'-deoxy-2'-fluorocytidine-3'-phosphate
  modified_base 9: mod_base = OTHER; note = 2'-deoxy-2'-fluorouridine-3'-phosphate
  modified_base 10: mod_base = OTHER; note = 2'-O-methylcytidine-3'-phosphate
  modified_base 11: mod_base = OTHER; note = 2'-O-methyluridine-3'-phosphate
  modified_base 12: mod_base = OTHER; note = 2'-O-methyladenosine-3'-phosphate
  modified_base 13: mod_base = OTHER; note = 2'-O-methylcytidine-3'-phosphate
  modified_base 14: mod_base = OTHER; note = 2'-O-methyladenosine-3'-phosphate
  modified_base 15: mod_base = OTHER; note = 2'-O-methyladenosine-3'-phosphate
  modified_base 16: mod_base = OTHER; note = 2'-O-methyluridine-3'-phosphate
  modified_base 17: mod_base = OTHER; note = 2'-O-methyluridine-3'-phosphate
  modified_base 18: mod_base = OTHER; note = 2'-O-methyladenosine-3'-phosphate
  modified_base 19: mod_base = OTHER; note 2'-O-methyluridine-3'-phosphate-N-[tris(GalNAc-alkyl)-amido decanoyl)]-4-hydroxyprolinol (Hyp-(GalNAc-alkyl)3)
aggcgttctctacaattat

SEQ ID NO: 116 - RNA, 19 nt, synthetic construct
  source 1..19: mol_type = other RNA
  modified_base 1: mod_base = OTHER; note = 2'-O-methyladenosine-3'-phosphorothioate
  modified_base 2: mod_base = OTHER; note = 2'-O-methylcytidine-3'-phosphorothioate
  modified_base 3: mod_base = OTHER; note = 2'-O-methylcytidine-3'-phosphate
  modified_base 4: mod_base = OTHER; note = 2'-O-methylcytidine-3'-phosphate
  modified_base 5: mod_base = OTHER; note = 2'-O-methylguanosine-3'-phosphate
  modified_base 6: mod_base = OTHER; note = 2'-O-methyluridine-3'-phosphate
  modified_base 7: mod_base = OTHER; note = 2'-deoxy-2'-fluorouridine-3'-phosphate
  modified_base 8: mod_base = OTHER; note = 2'-deoxy-2'-fluorocytidine-3'-phosphate
  modified_base 9: mod_base = OTHER; note = 2'-deoxy-2'-fluorouridine-3'-phosphate
  modified_base 10: mod_base = OTHER; note = 2'-O-methylcytidine-3'-phosphate
  modified_base 11: mod_base = OTHER; note = 2'-O-methyluridine-3'-phosphate
  modified_base 12: mod_base = OTHER; note = 2'-O-methyladenosine-3'-phosphate
  modified_base 13: mod_base = OTHER; note = 2'-O-methylcytidine-3'-phosphate
  modified_base 14: mod_base = OTHER; note = 2'-O-methyladenosine-3'-phosphate
  modified_base 15: mod_base = OTHER; note = 2'-O-methyladenosine-3'-phosphate
  modified_base 16: mod_base = OTHER; note = 2'-O-methyluridine-3'-phosphate
  modified_base 17: mod_base = OTHER; note = 2'-O-methyluridine-3'-phosphate
  modified_base 18: mod_base = OTHER; note = 2'-O-methyladenosine-3'-phosphate
  modified_base 19: mod_base = OTHER; note 2'-O-methyluridine-3'-phosphate-N-[tris(GalNAc-alkyl)-amido decanoyl)]-4-hydroxyprolinol (Hyp-(GalNAc-alkyl)3)
acccgttctctacaattat

SEQ ID NO: 117 - RNA, 19 nt, synthetic construct
  source 1..19: mol_type = other RNA
  modified_base 1: mod_base = OTHER; note = 2'-O-methyluridine-3'-phosphorothioate
  modified_base 2: mod_base = OTHER; note = 2'-O-methylguanosine-3'-phosphorothioate
  modified_base 3: mod_base = OTHER; note = 2'-O-methylcytidine-3'-phosphate
  modified_base 4: mod_base = OTHER; note = 2'-O-methylcytidine-3'-phosphate
  modified_base 5: mod_base = OTHER; note = 2'-O-methylguanosine-3'-phosphate
  modified_base 6: mod_base = OTHER; note = 2'-O-methyluridine-3'-phosphate
  modified_base 7: mod_base = OTHER; note = 2'-deoxy-2'-fluorouridine-3'-phosphate
  modified_base 8: mod_base = OTHER; note = 2'-deoxy-2'-fluorocytidine-3'-phosphate
  modified_base 9: mod_base = OTHER; note = 2'-deoxy-2'-fluorouridine-3'-phosphate
  modified_base 10: mod_base = OTHER; note = 2'-O-methylcytidine-3'-phosphate
  modified_base 11: mod_base = OTHER; note = 2'-O-methyluridine-3'-phosphate
  modified_base 12: mod_base = OTHER; note = 2'-O-methyladenosine-3'-phosphate
  modified_base 13: mod_base = OTHER; note = 2'-O-methylcytidine-3'-phosphate
  modified_base 14: mod_base = OTHER; note = 2'-O-methyladenosine-3'-phosphate
  modified_base 15: mod_base = OTHER; note = 2'-O-methyladenosine-3'-phosphate
  modified_base 16: mod_base = OTHER; note = 2'-O-methyluridine-3'-phosphate
  modified_base 17: mod_base = OTHER; note = 2'-O-methyluridine-3'-phosphate
  modified_base 18: mod_base = OTHER; note = 2'-O-methyladenosine-3'-phosphate
  modified_base 19: mod_base = OTHER; note 2'-O-methyluridine-3'-phosphate-N-[tris(GalNAc-alkyl)-amido decanoyl)]-4-hydroxyprolinol (Hyp-(GalNAc-alkyl)3)
tgccgttctctacaattat

SEQ ID NO: 118 - RNA, 21 nt, synthetic construct
  source 1..21: mol_type = other RNA
  modified_base 1: mod_base = OTHER; note = 2'-O-methylcytidine-3'-phosphorothioate
  modified_base 2: mod_base = OTHER; note = 2'-O-methylguanosine-3'-phosphorothioate
  modified_base 3: mod_base = OTHER; note = 2'-O-methyladenosine-3'-phosphate
  modified_base 4: mod_base = OTHER; note = 2'-O-methylguanosine-3'-phosphate
  modified_base 5: mod_base = OTHER; note = 2'-O-methylcytidine-3'-phosphate
  modified_base 6: mod_base = OTHER; note = 2'-O-methylcytidine-3'-phosphate
  modified_base 7: mod_base = OTHER; note = 2'-O-methylguanosine-3'-phosphate
  modified_base 8: mod_base = OTHER; note = 2'-O-methyluridine-3'-phosphate
  modified_base 9: mod_base = OTHER; note = 2'-deoxy-2'-fluorouridine-3'-phosphate
  modified_base 10: mod_base = OTHER; note = 2'-deoxy-2'-fluorocytidine-3'-phosphate
  modified_base 11: mod_base = OTHER; note = 2'-deoxy-2'-fluorouridine-3'-phosphate
  modified_base 12: mod_base = OTHER; note = 2'-O-methylcytidine-3'-phosphate
  modified_base 13: mod_base = OTHER; note = 2'-O-methyluridine-3'-phosphate
  modified_base 14: mod_base = OTHER; note = 2'-O-methyladenosine-3'-phosphate
  modified_base 15: mod_base = OTHER; note = 2'-O-methylcytidine-3'-phosphate
  modified_base 16: mod_base = OTHER; note = 2'-O-methyladenosine-3'-phosphate
  modified_base 17: mod_base = OTHER; note = 2'-O-methyladenosine-3'-phosphate
  modified_base 18: mod_base = OTHER; note = 2'-O-methyluridine-3'-phosphate
  modified_base 19: mod_base = OTHER; note = 2'-O-methyluridine-3'-phosphate
  modified_base 20: mod_base = OTHER; note = 2'-O-methyladenosine-3'-phosphate
  modified_base 21: mod_base = OTHER; note 2'-O-methyluridine-3'-phosphate-N-[tris(GalNAc-alkyl)-amido decanoyl)]-4-hydroxyprolinol (Hyp-(GalNAc-alkyl)3)
cgagccgttctctacaattat

SEQ ID NO: 119 - RNA, 21 nt, synthetic construct
  source 1..21: mol_type = other RNA
  modified_base 1: mod_base = OTHER; note = 2'-O-methylguanosine-3'-phosphorothioate
  modified_base 2: mod_base = OTHER; note = 2'-O-methyladenosine-3'-phosphorothioate
  modified_base 3: mod_base = OTHER; note = 2'-O-methylguanosine-3'-phosphate
  modified_base 4: mod_base = OTHER; note = 2'-O-methylcytidine-3'-phosphate
  modified_base 5: mod_base = OTHER; note = 2'-O-methylcytidine-3'-phosphate
  modified_base 6: mod_base = OTHER; note = 2'-O-methylguanosine-3'-phosphate
  modified_base 7: mod_base = OTHER; note = 2'-deoxy-2'-fluorouridine-3'-phosphate
  modified_base 8: mod_base = OTHER; note = 2'-O-methyluridine-3'-phosphate
  modified_base 9: mod_base = OTHER; note = 2'-deoxy-2'-fluorocytidine-3'-phosphate
  modified_base 10: mod_base = OTHER; note = 2'-deoxy-2'-fluorouridine-3'-phosphate
  modified_base 11: mod_base = OTHER; note = 2'-deoxy-2'-fluorocytidine-3'-phosphate
  modified_base 12: mod_base = OTHER; note = 2'-O-methyluridine-3'-phosphate
  modified_base 13: mod_base = OTHER; note = 2'-O-methyladenosine-3'-phosphate
  modified_base 14: mod_base = OTHER; note = 2'-O-methylcytidine-3'-phosphate
  modified_base 15: mod_base = OTHER; note = 2'-O-methyladenosine-3'-phosphate
  modified_base 16: mod_base = OTHER; note = 2'-O-methyladenosine-3'-phosphate
  modified_base 17: mod_base = OTHER; note = 2'-O-methyluridine-3'-phosphate
  modified_base 18: mod_base = OTHER; note = 2'-O-methyluridine-3'-phosphate
  modified_base 19: mod_base = OTHER; note = 2'-O-methyladenosine-3'-phosphate
  modified_base 20: mod_base = OTHER; note = 2'-O-methylcytidine-3'-phosphate
  modified_base 21: mod_base = OTHER; note 2'-O-methyluridine-3'-phosphate-N-[tris(GalNAc-alkyl)-amido decanoyl)]-4-hydroxyprolinol (Hyp-(GalNAc-alkyl)3)
gagccgttctctacaattact

SEQ ID NO: 120 - RNA, 21 nt, synthetic construct
  source 1..21: mol_type = other RNA
  modified_base 1: mod_base = OTHER; note = 2'-O-methylguanosine-3'-phosphorothioate
  modified_base 2: mod_base = OTHER; note = 2'-O-methyladenosine-3'-phosphorothioate
  modified_base 3: mod_base = OTHER; note = 2'-O-methylguanosine-3'-phosphate
  modified_base 4: mod_base = OTHER; note = 2'-O-methylcytidine-3'-phosphate
  modified_base 5: mod_base = OTHER; note = 2'-O-methylcytidine-3'-phosphate
  modified_base 6: mod_base = OTHER; note = 2'-O-methylguanosine-3'-phosphate
  modified_base 7: mod_base = OTHER; note = 2'-deoxy-2'-fluorouridine-3'-phosphate
  modified_base 8: mod_base = OTHER; note = 2'-O-methyluridine-3'-phosphate
  modified_base 9: mod_base = OTHER; note = 2'-deoxy-2'-fluorocytidine-3'-phosphate
  modified_base 10: mod_base = OTHER; note = 2'-deoxy-2'-fluorouridine-3'-phosphate
  modified_base 11: mod_base = OTHER; note = 2'-deoxy-2'-fluorocytidine-3'-phosphate
  modified_base 12: mod_base = OTHER; note = 2'-O-methyluridine-3'-phosphate
  modified_base 13: mod_base = OTHER; note = 2'-O-methyladenosine-3'-phosphate
  modified_base 14: mod_base = OTHER; note = 2'-O-methylcytidine-3'-phosphate
  modified_base 15: mod_base = OTHER; note = 2'-O-methyladenosine-3'-phosphate
  modified_base 16: mod_base = OTHER; note = 2'-O-methyladenosine-3'-phosphate
  modified_base 17: mod_base = OTHER; note = 2'-O-methyluridine-3'-phosphate
  modified_base 18: mod_base = OTHER; note = 2'-O-methyluridine-3'-phosphate
  modified_base 19: mod_base = OTHER; note = 2'-O-methyladenosine-3'-phosphate
  modified_base 20: mod_base = OTHER; note = 2'-O-methylcytidine-3'-phosphate
  modified_base 21: mod_base = OTHER; note 2'-O-methyluridine-3'-phosphate-N-[tris(GalNAc-alkyl)-amido decanoyl)]-4-hydroxyprolinol (Hyp-(GalNAc-alkyl)3)
gagccgttctctacaattact

SEQ ID NO: 121 - RNA, 21 nt, synthetic construct
  source 1..21: mol_type = other RNA
  modified_base 1: mod_base = OTHER; note = 2'-O-methylguanosine-3'-phosphorothioate
  modified_base 2: mod_base = OTHER; note = 2'-O-methyladenosine-3'-phosphorothioate
  modified_base 3: mod_base = OTHER; note = 2'-O-methylguanosine-3'-phosphate
  modified_base 4: mod_base = OTHER; note = 2'-O-methylcytidine-3'-phosphate
  modified_base 5: mod_base = OTHER; note = 2'-O-methylcytidine-3'-phosphate
  modified_base 6: mod_base = OTHER; note = 2'-O-methylguanosine-3'-phosphate
  modified_base 7: mod_base = OTHER; note = 2'-deoxy-2'-fluorouridine-3'-phosphate
  modified_base 8: mod_base = OTHER; note = 2'-O-methyluridine-3'-phosphate
  modified_base 9: mod_base = OTHER; note = 2'-deoxy-2'-fluorocytidine-3'-phosphate
  modified_base 10: mod_base = OTHER; note = 2'-deoxy-2'-fluorouridine-3'-phosphate
  modified_base 11: mod_base = OTHER; note = 2'-deoxy-2'-fluorocytidine-3'-phosphate
  modified_base 12: mod_base = OTHER; note = 2'-O-methyluridine-3'-phosphate
  modified_base 13: mod_base = OTHER; note = 2'-O-methyladenosine-3'-phosphate
  modified_base 14: mod_base = OTHER; note = 2'-O-methylcytidine-3'-phosphate
  modified_base 15: mod_base = OTHER; note = 2'-O-methyladenosine-3'-phosphate
  modified_base 16: mod_base = OTHER; note = 2'-O-methyladenosine-3'-phosphate
  modified_base 17: mod_base = OTHER; note = 2'-O-methyluridine-3'-phosphate
  modified_base 18: mod_base = OTHER; note = 2'-O-methyluridine-3'-phosphate
  modified_base 19: mod_base = OTHER; note = 2'-O-methyladenosine-3'-phosphate
  modified_base 20: mod_base = OTHER; note = 2'-O-methylcytidine-3'-phosphate
  modified_base 21: mod_base = OTHER; note 2'-O-methyluridine-3'-phosphate-N-[tris(GalNAc-alkyl)-amido decanoyl)]-4-hydroxyprolinol (Hyp-(GalNAc-alkyl)3)
gagccgttctctacaattact

SEQ ID NO: 122 - RNA, 21 nt, synthetic construct
  source 1..21: mol_type = other RNA
  modified_base 1: mod_base = OTHER; note = 2'-O-methylguanosine-3'-phosphorothioate
  modified_base 2: mod_base = OTHER; note = 2'-O-methyladenosine-3'-phosphorothioate
  modified_base 3: mod_base = OTHER; note = 2'-O-methylguanosine-3'-phosphate
  modified_base 4: mod_base = OTHER; note = 2'-O-methylcytidine-3'-phosphate
  modified_base 5: mod_base = OTHER; note = 2'-O-methylcytidine-3'-phosphate
  modified_base 6: mod_base = OTHER; note = 2'-O-methylguanosine-3'-phosphate
  modified_base 7: mod_base = OTHER; note = 2'-deoxy-2'-fluorouridine-3'-phosphate
  modified_base 8: mod_base = OTHER; note = 2'-O-methyluridine-3'-phosphate
  modified_base 9: mod_base = OTHER; note = 2'-deoxy-2'-fluorocytidine-3'-phosphate
  modified_base 10: mod_base = OTHER; note = 2'-deoxy-2'-fluorouridine-3'-phosphate
  modified_base 11: mod_base = OTHER; note = 2'-deoxy-2'-fluorocytidine-3'-phosphate
  modified_base 12: mod_base = OTHER; note = 2'-O-methyluridine-3'-phosphate
  modified_base 13: mod_base = OTHER; note = 2'-O-methyladenosine-3'-phosphate
  modified_base 14: mod_base = OTHER; note = 2'-O-methylcytidine-3'-phosphate
  modified_base 15: mod_base = OTHER; note = 2'-O-methyladenosine-3'-phosphate
  modified_base 16: mod_base = OTHER; note = 2'-O-methyladenosine-3'-phosphate
  modified_base 17: mod_base = OTHER; note = 2'-O-methyluridine-3'-phosphate
  modified_base 18: mod_base = OTHER; note = 2'-O-methyluridine-3'-phosphate
  modified_base 19: mod_base = OTHER; note = 2'-O-methyladenosine-3'-phosphate
  modified_base 20: mod_base = OTHER; note = 2'-O-methylcytidine-3'-phosphate
  modified_base 21: mod_base = OTHER; note 2'-O-methyluridine-3'-phosphate-N-[tris(GalNAc-alkyl)-amido decanoyl)]-4-hydroxyprolinol (Hyp-(GalNAc-alkyl)3)
gagccgttctctacaattact

SEQ ID NO: 123 - RNA, 21 nt, synthetic construct
  source 1..21: mol_type = other RNA
  modified_base 1: mod_base = OTHER; note = 2'-O-methylguanosine-3'-phosphorothioate
  modified_base 2: mod_base = OTHER; note = 2'-O-methyladenosine-3'-phosphorothioate
  modified_base 3: mod_base = OTHER; note = 2'-O-methylguanosine-3'-phosphate
  modified_base 4: mod_base = OTHER; note = 2'-O-methylcytidine-3'-phosphate
  modified_base 5: mod_base = OTHER; note = 2'-O-methylcytidine-3'-phosphate
  modified_base 6: mod_base = OTHER; note = 2'-O-methylguanosine-3'-phosphate
  modified_base 7: mod_base = OTHER; note = 2'-deoxy-2'-fluorouridine-3'-phosphate
  modified_base 8: mod_base = OTHER; note = 2'-O-methyluridine-3'-phosphate
  modified_base 9: mod_base = OTHER; note = 2'-deoxy-2'-fluorocytidine-3'-phosphate
  modified_base 10: mod_base = OTHER; note = 2'-deoxy-2'-fluorouridine-3'-phosphate
  modified_base 11: mod_base = OTHER; note = 2'-deoxy-2'-fluorocytidine-3'-phosphate
  modified_base 12: mod_base = OTHER; note = 2'-O-methyluridine-3'-phosphate
  modified_base 13: mod_base = OTHER; note = 2'-O-methyladenosine-3'-phosphate
  modified_base 14: mod_base = OTHER; note = 2'-O-methylcytidine-3'-phosphate
  modified_base 15: mod_base = OTHER; note = 2'-O-methyladenosine-3'-phosphate
  modified_base 16: mod_base = OTHER; note = 2'-O-methyladenosine-3'-phosphate
  modified_base 17: mod_base = OTHER; note = 2'-O-methyluridine-3'-phosphate
  modified_base 18: mod_base = OTHER; note = 2'-O-methyluridine-3'-phosphate
  modified_base 19: mod_base = OTHER; note = 2'-O-methyladenosine-3'-phosphate
  modified_base 20: mod_base = OTHER; note = 2'-O-methylcytidine-3'-phosphate
  modified_base 21: mod_base = OTHER; note 2'-O-methyluridine-3'-phosphate-N-[tris(GalNAc-alkyl)-amido decanoyl)]-4-hydroxyprolinol (Hyp-(GalNAc-alkyl)3)
gagccgttctctacaattact

SEQ ID NO: 124 - RNA, 21 nt, synthetic construct
  source 1..21: mol_type = other RNA
  modified_base 1: mod_base = OTHER; note = 2'-O-methylguanosine-3'-phosphorothioate
  modified_base 2: mod_base = OTHER; note = 2'-O-methyladenosine-3'-phosphorothioate
  modified_base 3: mod_base = OTHER; note = 2'-O-methylguanosine-3'-phosphate
  modified_base 4: mod_base = OTHER; note = 2'-O-methylcytidine-3'-phosphate
  modified_base 5: mod_base = OTHER; note = 2'-O-methylcytidine-3'-phosphate
  modified_base 6: mod_base = OTHER; note = 2'-O-methylguanosine-3'-phosphate
  modified_base 7: mod_base = OTHER; note = 2'-deoxy-2'-fluorouridine-3'-phosphate
  modified_base 8: mod_base = OTHER; note = 2'-O-methyluridine-3'-phosphate
  modified_base 9: mod_base = OTHER; note = 2'-deoxy-2'-fluorocytidine-3'-phosphate
  modified_base 10: mod_base = OTHER; note = 2'-deoxy-2'-fluorouridine-3'-phosphate
  modified_base 11: mod_base = OTHER; note = 2'-deoxy-2'-fluorocytidine-3'-phosphate
  modified_base 12: mod_base = OTHER; note = 2'-O-methyluridine-3'-phosphate
  modified_base 13: mod_base = OTHER; note = 2'-O-methyladenosine-3'-phosphate
  modified_base 14: mod_base = OTHER; note = 2'-O-methylcytidine-3'-phosphate
  modified_base 15: mod_base = OTHER; note = 2'-O-methyladenosine-3'-phosphate
  modified_base 16: mod_base = OTHER; note = 2'-O-methyladenosine-3'-phosphate
  modified_base 17: mod_base = OTHER; note = 2'-O-methyluridine-3'-phosphate
  modified_base 18: mod_base = OTHER; note = 2'-O-methyluridine-3'-phosphate
  modified_base 19: mod_base = OTHER; note = 2'-O-methyladenosine-3'-phosphate
  modified_base 20: mod_base = OTHER; note = 2'-O-methylcytidine-3'-phosphate
  modified_base 21: mod_base = OTHER; note 2'-O-methyluridine-3'-phosphate-N-[tris(GalNAc-alkyl)-amido decanoyl)]-4-hydroxyprolinol (Hyp-(GalNAc-alkyl)3)
gagccgttctctacaattact

SEQ ID NO: 125 - RNA, 21 nt, synthetic construct
  source 1..21: mol_type = other RNA
  modified_base 1: mod_base = OTHER; note = 2'-O-methylguanosine-3'-phosphorothioate
  modified_base 2: mod_base = OTHER; note = 2'-O-methyladenosine-3'-phosphorothioate
  modified_base 3: mod_base = OTHER; note = 2'-O-methylguanosine-3'-phosphate
  modified_base 4: mod_base = OTHER; note = 2'-O-methylcytidine-3'-phosphate
  modified_base 5: mod_base = OTHER; note = 2'-O-methylcytidine-3'-phosphate
  modified_base 6: mod_base = OTHER; note = 2'-O-methylguanosine-3'-phosphate
  modified_base 7: mod_base = OTHER; note = 2'-deoxy-2'-fluorouridine-3'-phosphate
  modified_base 8: mod_base = OTHER; note = 2'-O-methyluridine-3'-phosphate
  modified_base 9: mod_base = OTHER; note = 2'-deoxy-2'-fluorocytidine-3'-phosphate
  modified_base 10: mod_base = OTHER; note = 2'-deoxy-2'-fluorouridine-3'-phosphate
  modified_base 11: mod_base = OTHER; note = 2'-deoxy-2'-fluorocytidine-3'-phosphate
  modified_base 12: mod_base = OTHER; note = 2'-O-methyluridine-3'-phosphate
  modified_base 13: mod_base = OTHER; note = 2'-O-methyladenosine-3'-phosphate
  modified_base 14: mod_base = OTHER; note = 2'-O-methylcytidine-3'-phosphate
  modified_base 15: mod_base = OTHER; note = 2'-O-methyladenosine-3'-phosphate
  modified_base 16: mod_base = OTHER; note = 2'-O-methyladenosine-3'-phosphate
  modified_base 17: mod_base = OTHER; note = 2'-O-methyluridine-3'-phosphate
  modified_base 18: mod_base = OTHER; note = 2'-O-methyluridine-3'-phosphate
  modified_base 19: mod_base = OTHER; note = 2'-O-methyladenosine-3'-phosphate
  modified_base 20: mod_base = OTHER; note = 2'-O-methylcytidine-3'-phosphate
  modified_base 21: mod_base = OTHER; note 2'-O-methyluridine-3'-phosphate-N-[tris(GalNAc-alkyl)-amido decanoyl)]-4-hydroxyprolinol (Hyp-(GalNAc-alkyl)3)
gagccgttctctacaattact

SEQ ID NO: 126 - RNA, 21 nt, synthetic construct
  source 1..21: mol_type = other RNA
  modified_base 1: mod_base = OTHER; note = 2'-O-methylguanosine-3'-phosphorothioate
  modified_base 2: mod_base = OTHER; note = 2'-O-methyladenosine-3'-phosphorothioate
  modified_base 3: mod_base = OTHER; note = 2'-O-methylguanosine-3'-phosphate
  modified_base 4: mod_base = OTHER; note = 2'-O-methylcytidine-3'-phosphate
  modified_base 5: mod_base = OTHER; note = 2'-O-methylcytidine-3'-phosphate
  modified_base 6: mod_base = OTHER; note = 2'-O-methylguanosine-3'-phosphate
  modified_base 7: mod_base = OTHER; note = 2'-deoxy-2'-fluorouridine-3'-phosphate
  modified_base 8: mod_base = OTHER; note = 2'-O-methyluridine-3'-phosphate
  modified_base 9: mod_base = OTHER; note = 2'-deoxy-2'-fluorocytidine-3'-phosphate
  modified_base 10: mod_base = OTHER; note = 2'-deoxy-2'-fluorouridine-3'-phosphate
  modified_base 11: mod_base = OTHER; note = 2'-deoxy-2'-fluorocytidine-3'-phosphate
  modified_base 12: mod_base = OTHER; note = 2'-O-methyluridine-3'-phosphate
  modified_base 13: mod_base = OTHER; note = 2'-O-methyladenosine-3'-phosphate
  modified_base 14: mod_base = OTHER; note = 2'-O-methylcytidine-3'-phosphate
  modified_base 15: mod_base = OTHER; note = 2'-O-methyladenosine-3'-phosphate
  modified_base 16: mod_base = OTHER; note = 2'-O-methyladenosine-3'-phosphate
  modified_base 17: mod_base = OTHER; note = 2'-O-methyluridine-3'-phosphate
  modified_base 18: mod_base = OTHER; note = 2'-O-methyluridine-3'-phosphate
  modified_base 19: mod_base = OTHER; note = 2'-O-methyladenosine-3'-phosphate
  modified_base 20: mod_base = OTHER; note = 2'-O-methylcytidine-3'-phosphate
  modified_base 21: mod_base = OTHER; note 2'-O-methyluridine-3'-phosphate-N-[tris(GalNAc-alkyl)-amido decanoyl)]-4-hydroxyprolinol (Hyp-(GalNAc-alkyl)3)
gagccgttctctacaattact

SEQ ID NO: 127 - RNA, 21 nt, synthetic construct
  source 1..21: mol_type = other RNA
  modified_base 1: mod_base = OTHER; note = 2'-O-methylguanosine-3'-phosphorothioate
  modified_base 2: mod_base = OTHER; note = 2'-O-methyladenosine-3'-phosphorothioate
  modified_base 3: mod_base = OTHER; note = 2'-O-methylguanosine-3'-phosphate
  modified_base 4: mod_base = OTHER; note = 2'-O-methylcytidine-3'-phosphate
  modified_base 5: mod_base = OTHER; note = 2'-O-methylcytidine-3'-phosphate
  modified_base 6: mod_base = OTHER; note = 2'-O-methylguanosine-3'-phosphate
  modified_base 7: mod_base = OTHER; note = 2'-deoxy-2'-fluorouridine-3'-phosphate
  modified_base 8: mod_base = OTHER; note = 2'-O-methyluridine-3'-phosphate
  modified_base 9: mod_base = OTHER; note = 2'-deoxy-2'-fluorocytidine-3'-phosphate
  modified_base 10: mod_base = OTHER; note = 2'-deoxy-2'-fluorouridine-3'-phosphate
  modified_base 11: mod_base = OTHER; note = 2'-deoxy-2'-fluorocytidine-3'-phosphate
  modified_base 12: mod_base = OTHER; note = 2'-O-methyluridine-3'-phosphate
  modified_base 13: mod_base = OTHER; note = 2'-O-methyladenosine-3'-phosphate
  modified_base 14: mod_base = OTHER; note = 2'-O-methylcytidine-3'-phosphate
  modified_base 15: mod_base = OTHER; note = 2'-O-methyladenosine-3'-phosphate
  modified_base 16: mod_base = OTHER; note = 2'-O-methyladenosine-3'-phosphate
  modified_base 17: mod_base = OTHER; note = 2'-O-methyluridine-3'-phosphate
  modified_base 18: mod_base = OTHER; note = 2'-O-methyluridine-3'-phosphate
  modified_base 19: mod_base = OTHER; note = 2'-O-methyladenosine-3'-phosphate
  modified_base 20: mod_base = OTHER; note = 2'-O-methylcytidine-3'-phosphate
  modified_base 21: mod_base = OTHER; note 2'-O-methyluridine-3'-phosphate-N-[tris(GalNAc-alkyl)-amido decanoyl)]-4-hydroxyprolinol (Hyp-(GalNAc-alkyl)3)
gagccgttctctacaattact

SEQ ID NO: 128 - RNA, 21 nt, synthetic construct
  source 1..21: mol_type = other RNA
  modified_base 1: mod_base = OTHER; note = 2'-O-methylguanosine-3'-phosphorothioate
  modified_base 2: mod_base = OTHER; note = 2'-O-methyladenosine-3'-phosphorothioate
  modified_base 3: mod_base = OTHER; note = 2'-O-methylguanosine-3'-phosphate
  modified_base 4: mod_base = OTHER; note = 2'-O-methylcytidine-3'-phosphate
  modified_base 5: mod_base = OTHER; note = 2'-O-methylcytidine-3'-phosphate
  modified_base 6: mod_base = OTHER; note = 2'-O-methylguanosine-3'-phosphate
  modified_base 7: mod_base = OTHER; note = 2'-deoxy-2'-fluorouridine-3'-phosphate
  modified_base 8: mod_base = OTHER; note = 2'-O-methyluridine-3'-phosphate
  modified_base 9: mod_base = OTHER; note = 2'-deoxy-2'-fluorocytidine-3'-phosphate
  modified_base 10: mod_base = OTHER; note = 2'-deoxy-2'-fluorouridine-3'-phosphate
  modified_base 11: mod_base = OTHER; note = 2'-deoxy-2'-fluorocytidine-3'-phosphate
  modified_base 12: mod_base = OTHER; note = 2'-O-methyluridine-3'-phosphate
  modified_base 13: mod_base = OTHER; note = 2'-O-methyladenosine-3'-phosphate
  modified_base 14: mod_base = OTHER; note = 2'-O-methylcytidine-3'-phosphate
  modified_base 15: mod_base = OTHER; note = 2'-O-methyladenosine-3'-phosphate
  modified_base 16: mod_base = OTHER; note = 2'-O-methyladenosine-3'-phosphate
  modified_base 17: mod_base = OTHER; note = 2'-O-methyluridine-3'-phosphate
  modified_base 18: mod_base = OTHER; note = 2'-O-methyluridine-3'-phosphate
  modified_base 19: mod_base = OTHER; note = 2'-O-methyladenosine-3'-phosphate
  modified_base 20: mod_base = OTHER; note = 2'-O-methylcytidine-3'-phosphate
  modified_base 21: mod_base = OTHER; note 2'-O-methyluridine-3'-phosphate-N-[tris(GalNAc-alkyl)-amido decanoyl)]-4-hydroxyprolinol (Hyp-(GalNAc-alkyl)3)
gagccgttctctacaattact

SEQ ID NO: 129 - RNA, 21 nt, synthetic construct
  source 1..21: mol_type = other RNA
  modified_base 1: mod_base = OTHER; note = 2'-O-methylguanosine-3'-phosphorothioate
  modified_base 2: mod_base = OTHER; note = 2'-O-methyladenosine-3'-phosphorothioate
  modified_base 3: mod_base = OTHER; note = 2'-O-methylguanosine-3'-phosphate
  modified_base 4: mod_base = OTHER; note = 2'-O-methylcytidine-3'-phosphate
  modified_base 5: mod_base = OTHER; note = 2'-O-methylcytidine-3'-phosphate
  modified_base 6: mod_base = OTHER; note = 2'-O-methylguanosine-3'-phosphate
  modified_base 7: mod_base = OTHER; note = 2'-deoxy-2'-fluorouridine-3'-phosphate
  modified_base 8: mod_base = OTHER; note = 2'-O-methyluridine-3'-phosphate
  modified_base 9: mod_base = OTHER; note = 2'-deoxy-2'-fluorocytidine-3'-phosphate
  modified_base 10: mod_base = OTHER; note = 2'-deoxy-2'-fluorouridine-3'-phosphate
  modified_base 11: mod_base = OTHER; note = 2'-deoxy-2'-fluorocytidine-3'-phosphate
  modified_base 12: mod_base = OTHER; note = 2'-O-methyluridine-3'-phosphate
  modified_base 13: mod_base = OTHER; note = 2'-O-methyladenosine-3'-phosphate
  modified_base 14: mod_base = OTHER; note = 2'-O-methylcytidine-3'-phosphate
  modified_base 15: mod_base = OTHER; note = 2'-O-methyladenosine-3'-phosphate
  modified_base 16: mod_base = OTHER; note = 2'-O-methyladenosine-3'-phosphate
  modified_base 17: mod_base = OTHER; note = 2'-O-methyluridine-3'-phosphate
  modified_base 18: mod_base = OTHER; note = 2'-O-methyluridine-3'-phosphate
  modified_base 19: mod_base = OTHER; note = 2'-O-methyladenosine-3'-phosphate
  modified_base 20: mod_base = OTHER; note = 2'-O-methylcytidine-3'-phosphate
  modified_base 21: mod_base = OTHER; note 2'-O-methyluridine-3'-phosphate-N-[tris(GalNAc-alkyl)-amido decanoyl)]-4-hydroxyprolinol (Hyp-(GalNAc-alkyl)3)
gagccgttctctacaattact

SEQ ID NO: 130 - RNA, 21 nt, synthetic construct
  source 1..21: mol_type = other RNA
  modified_base 1: mod_base = OTHER; note = 2'-O-methylguanosine-3'-phosphorothioate
  modified_base 2: mod_base = OTHER; note = 2'-O-methyladenosine-3'-phosphorothioate
  modified_base 3: mod_base = OTHER; note = 2'-O-methylguanosine-3'-phosphate
  modified_base 4: mod_base = OTHER; note = 2'-O-methylcytidine-3'-phosphate
  modified_base 5: mod_base = OTHER; note = 2'-O-methylcytidine-3'-phosphate
  modified_base 6: mod_base = OTHER; note = 2'-O-methylguanosine-3'-phosphate
  modified_base 7: mod_base = OTHER; note = 2'-deoxy-2'-fluorouridine-3'-phosphate
  modified_base 8: mod_base = OTHER; note = 2'-O-methyluridine-3'-phosphate
  modified_base 9: mod_base = OTHER; note = 2'-deoxy-2'-fluorocytidine-3'-phosphate
  modified_base 10: mod_base = OTHER; note = 2'-deoxy-2'-fluorouridine-3'-phosphate
  modified_base 11: mod_base = OTHER; note = 2'-deoxy-2'-fluorocytidine-3'-phosphate
  modified_base 12: mod_base = OTHER; note = 2'-O-methyluridine-3'-phosphate
  modified_base 13: mod_base = OTHER; note = 2'-O-methyladenosine-3'-phosphate
  modified_base 14: mod_base = OTHER; note = 2'-O-methylcytidine-3'-phosphate
  modified_base 15: mod_base = OTHER; note = 2'-O-methyladenosine-3'-phosphate
  modified_base 16: mod_base = OTHER; note = 2'-O-methyluridine-3'-phosphate
  modified_base 17: mod_base = OTHER; note = 2'-O-methyluridine-3'-phosphate
  modified_base 18: mod_base = OTHER; note = 2'-O-methyluridine-3'-phosphate
  modified_base 19: mod_base = OTHER; note = 2'-O-methyladenosine-3'-phosphate
  modified_base 20: mod_base = OTHER; note = 2'-O-methylcytidine-3'-phosphate
  modified_base 21: mod_base = OTHER; note 2'-O-methyluridine-3'-phosphate-N-[tris(GalNAc-alkyl)-amido decanoyl)]-4-hydroxyprolinol (Hyp-(GalNAc-alkyl)3)
gagccgttctctacatttact

SEQ ID NO: 131 - RNA, 21 nt, synthetic construct
  source 1..21: mol_type = other RNA
  modified_base 1: mod_base = OTHER; note = 2'-O-methylguanosine-3'-phosphorothioate
  modified_base 2: mod_base = OTHER; note = 2'-O-methyladenosine-3'-phosphorothioate
  modified_base 3: mod_base = OTHER; note = 2'-O-methylguanosine-3'-phosphate
  modified_base 4: mod_base = OTHER; note = 2'-O-methylcytidine-3'-phosphate
  modified_base 5: mod_base = OTHER; note = 2'-O-methylcytidine-3'-phosphate
  modified_base 6: mod_base = OTHER; note = 2'-O-methylguanosine-3'-phosphate
  modified_base 7: mod_base = OTHER; note = 2'-deoxy-2'-fluorouridine-3'-phosphate
  modified_base 8: mod_base = OTHER; note = 2'-O-methyluridine-3'-phosphate
  modified_base 9: mod_base = OTHER; note = 2'-deoxy-2'-fluorocytidine-3'-phosphate
  modified_base 10: mod_base = OTHER; note = 2'-deoxy-2'-fluorouridine-3'-phosphate
  modified_base 11: mod_base = OTHER; note = 2'-deoxy-2'-fluorocytidine-3'-phosphate
  modified_base 12: mod_base = OTHER; note = 2'-O-methyluridine-3'-phosphate
  modified_base 13: mod_base = OTHER; note = 2'-O-methyladenosine-3'-phosphate
  modified_base 14: mod_base = OTHER; note = 2'-O-methylcytidine-3'-phosphate
  modified_base 15: mod_base = OTHER; note = 2'-O-methyluridine-3'-phosphate
  modified_base 16: mod_base = OTHER; note = 2'-O-methyladenosine-3'-phosphate
  modified_base 17: mod_base = OTHER; note = 2'-O-methyluridine-3'-phosphate
  modified_base 18: mod_base = OTHER; note = 2'-O-methyluridine-3'-phosphate
  modified_base 19: mod_base = OTHER; note = 2'-O-methyladenosine-3'-phosphate
  modified_base 20: mod_base = OTHER; note = 2'-O-methylcytidine-3'-phosphate
  modified_base 21: mod_base = OTHER; note 2'-O-methyluridine-3'-phosphate-N-[tris(GalNAc-alkyl)-amido decanoyl)]-4-hydroxyprolinol (Hyp-(GalNAc-alkyl)3)
gagccgttctctactattact

SEQ ID NO: 132 - RNA, 21 nt, synthetic construct
  source 1..21: mol_type = other RNA
  modified_base 1: mod_base = OTHER; note = 2'-O-methylguanosine-3'-phosphorothioate
  modified_base 2: mod_base = OTHER; note = 2'-O-methyladenosine-3'-phosphorothioate
  modified_base 3: mod_base = OTHER; note = 2'-O-methylguanosine-3'-phosphate
  modified_base 4: mod_base = OTHER; note = 2'-O-methylcytidine-3'-phosphate
  modified_base 5: mod_base = OTHER; note = 2'-O-methylcytidine-3'-phosphate
  modified_base 6: mod_base = OTHER; note = 2'-O-methylguanosine-3'-phosphate
  modified_base 7: mod_base = OTHER; note = 2'-deoxy-2'-fluorouridine-3'-phosphate
  modified_base 8: mod_base = OTHER; note = 2'-O-methyluridine-3'-phosphate
  modified_base 9: mod_base = OTHER; note = 2'-deoxy-2'-fluorocytidine-3'-phosphate
  modified_base 10: mod_base = OTHER; note = 2'-deoxy-2'-fluorouridine-3'-phosphate
  modified_base 11: mod_base = OTHER; note = 2'-deoxy-2'-fluorocytidine-3'-phosphate
  modified_base 12: mod_base = OTHER; note = 2'-O-methyluridine-3'-phosphate
  modified_base 13: mod_base = OTHER; note = 2'-O-methyladenosine-3'-phosphate
  modified_base 14: mod_base = OTHER; note = 2'-O-methyluridine-3'-phosphate
  modified_base 15: mod_base = OTHER; note = 2'-O-methyladenosine-3'-phosphate
  modified_base 16: mod_base = OTHER; note = 2'-O-methyladenosine-3'-phosphate
  modified_base 17: mod_base = OTHER; note = 2'-O-methyluridine-3'-phosphate
  modified_base 18: mod_base = OTHER; note = 2'-O-methyluridine-3'-phosphate
  modified_base 19: mod_base = OTHER; note = 2'-O-methyladenosine-3'-phosphate
  modified_base 20: mod_base = OTHER; note = 2'-O-methylcytidine-3'-phosphate
  modified_base 21: mod_base = OTHER; note 2'-O-methyluridine-3'-phosphate-N-[tris(GalNAc-alkyl)-amido decanoyl)]-4-hydroxyprolinol (Hyp-(GalNAc-alkyl)3)
gagccgttctctataattact

SEQ ID NO: 133 - RNA, 21 nt, synthetic construct
  source 1..21: mol_type = other RNA
  modified_base 1: mod_base = OTHER; note = 2'-O-methylguanosine-3'-phosphorothioate
  modified_base 2: mod_base = OTHER; note = 2'-O-methyladenosine-3'-phosphorothioate
  modified_base 3: mod_base = OTHER; note = 2'-O-methylguanosine-3'-phosphate
  modified_base 4: mod_base = OTHER; note = 2'-O-methylcytidine-3'-phosphate
  modified_base 5: mod_base = OTHER; note = 2'-O-methylcytidine-3'-phosphate
  modified_base 6: mod_base = OTHER; note = 2'-O-methylguanosine-3'-phosphate
  modified_base 7: mod_base = OTHER; note = 2'-deoxy-2'-fluorouridine-3'-phosphate
  modified_base 8: mod_base = OTHER; note = 2'-O-methyluridine-3'-phosphate
  modified_base 9: mod_base = OTHER; note = 2'-deoxy-2'-fluoroguanosine-3'-phosphate
  modified_base 10: mod_base = OTHER; note = 2'-deoxy-2'-fluorouridine-3'-phosphate
  modified_base 11: mod_base = OTHER; note = 2'-deoxy-2'-fluorocytidine-3'-phosphate
  modified_base 12: mod_base = OTHER; note = 2'-O-methyluridine-3'-phosphate
  modified_base 13: mod_base = OTHER; note = 2'-O-methyladenosine-3'-phosphate
  modified_base 14: mod_base = OTHER; note = 2'-O-methylcytidine-3'-phosphate
  modified_base 15: mod_base = OTHER; note = 2'-O-methyladenosine-3'-phosphate
  modified_base 16: mod_base = OTHER; note = 2'-O-methyladenosine-3'-phosphate
  modified_base 17: mod_base = OTHER; note = 2'-O-methyluridine-3'-phosphate
  modified_base 18: mod_base = OTHER; note = 2'-O-methyluridine-3'-phosphate
  modified_base 19: mod_base = OTHER; note = 2'-O-methyladenosine-3'-phosphate
  modified_base 20: mod_base = OTHER; note = 2'-O-methylcytidine-3'-phosphate
  modified_base 21: mod_base = OTHER; note 2'-O-methyluridine-3'-phosphate-N-[tris(GalNAc-alkyl)-amido decanoyl)]-4-hydroxyprolinol (Hyp-(GalNAc-alkyl)3)
gagccgttgtctacaattact

SEQ ID NO: 134 - RNA, 21 nt, synthetic construct
  source 1..21: mol_type = other RNA
  modified_base 1: mod_base = OTHER; note = 2'-O-methylguanosine-3'-phosphorothioate
  modified_base 2: mod_base = OTHER; note = 2'-O-methyladenosine-3'-phosphorothioate
  modified_base 3: mod_base = OTHER; note = 2'-O-methylguanosine-3'-phosphate
  modified_base 4: mod_base = OTHER; note = 2'-O-methylcytidine-3'-phosphate
  modified_base 5: mod_base = OTHER; note = 2'-O-methylcytidine-3'-phosphate
  modified_base 6: mod_base = OTHER; note = 2'-O-methylguanosine-3'-phosphate
  modified_base 7: mod_base = OTHER; note = 2'-deoxy-2'-fluorouridine-3'-phosphate
  modified_base 8: mod_base = OTHER; note = 2'-O-methyladenosine-3'-phosphate
  modified_base 9: mod_base = OTHER; note = 2'-deoxy-2'-fluorocytidine-3'-phosphate
  modified_base 10: mod_base = OTHER; note = 2'-deoxy-2'-fluorouridine-3'-phosphate
  modified_base 11: mod_base = OTHER; note = 2'-deoxy-2'-fluorocytidine-3'-phosphate
  modified_base 12: mod_base = OTHER; note = 2'-O-methyluridine-3'-phosphate
  modified_base 13: mod_base = OTHER; note = 2'-O-methyladenosine-3'-phosphate
  modified_base 14: mod_base = OTHER; note = 2'-O-methylcytidine-3'-phosphate
  modified_base 15: mod_base = OTHER; note = 2'-O-methyladenosine-3'-phosphate
  modified_base 16: mod_base = OTHER; note = 2'-O-methyladenosine-3'-phosphate
  modified_base 17: mod_base = OTHER; note = 2'-O-methyluridine-3'-phosphate
  modified_base 18: mod_base = OTHER; note = 2'-O-methyluridine-3'-phosphate
  modified_base 19: mod_base = OTHER; note = 2'-O-methyladenosine-3'-phosphate
  modified_base 20: mod_base = OTHER; note = 2'-O-methylcytidine-3'-phosphate
  modified_base 21: mod_base = OTHER; note 2'-O-methyluridine-3'-phosphate-N-[tris(GalNAc-alkyl)-amido decanoyl)]-4-hydroxyprolinol (Hyp-(GalNAc-alkyl)3)
gagccgtactctacaattact

SEQ ID NO: 135 - RNA, 21 nt, synthetic construct
  source 1..21: mol_type = other RNA
  modified_base 1: mod_base = OTHER; note = 2'-O-methylguanosine-3'-phosphorothioate
  modified_base 2: mod_base = OTHER; note = 2'-O-methyladenosine-3'-phosphorothioate
  modified_base 3: mod_base = OTHER; note = 2'-O-methylguanosine-3'-phosphate
  modified_base 4: mod_base = OTHER; note = 2'-O-methylcytidine-3'-phosphate
  modified_base 5: mod_base = OTHER; note = 2'-O-methylcytidine-3'-phosphate
  modified_base 6: mod_base = OTHER; note = 2'-O-methylguanosine-3'-phosphate
  modified_base 7: mod_base = OTHER; note = 2'-deoxy-2'-fluoroadenosine-3'-phosphate
  modified_base 8: mod_base = OTHER; note = 2'-O-methyluridine-3'-phosphate
  modified_base 9: mod_base = OTHER; note = 2'-deoxy-2'-fluorocytidine-3'-phosphate
  modified_base 10: mod_base = OTHER; note = 2'-deoxy-2'-fluorouridine-3'-phosphate
  modified_base 11: mod_base = OTHER; note = 2'-deoxy-2'-fluorocytidine-3'-phosphate
  modified_base 12: mod_base = OTHER; note = 2'-O-methyluridine-3'-phosphate
  modified_base 13: mod_base = OTHER; note = 2'-O-methyladenosine-3'-phosphate
  modified_base 14: mod_base = OTHER; note = 2'-O-methylcytidine-3'-phosphate
  modified_base 15: mod_base = OTHER; note = 2'-O-methyladenosine-3'-phosphate
  modified_base 16: mod_base = OTHER; note = 2'-O-methyladenosine-3'-phosphate
  modified_base 17: mod_base = OTHER; note = 2'-O-methyluridine-3'-phosphate
  modified_base 18: mod_base = OTHER; note = 2'-O-methyluridine-3'-phosphate
  modified_base 19: mod_base = OTHER; note = 2'-O-methyladenosine-3'-phosphate
  modified_base 20: mod_base = OTHER; note = 2'-O-methylcytidine-3'-phosphate
  modified_base 21: mod_base = OTHER; note 2'-O-methyluridine-3'-phosphate-N-[tris(GalNAc-alkyl)-amido decanoyl)]-4-hydroxyprolinol (Hyp-(GalNAc-alkyl)3)
gagccgatctctacaattact

SEQ ID NO: 136 - RNA, 21 nt, synthetic construct
  source 1..21: mol_type = other RNA
  modified_base 1: mod_base = OTHER; note = 2'-O-methylguanosine-3'-phosphorothioate
  modified_base 2: mod_base = OTHER; note = 2'-O-methyladenosine-3'-phosphorothioate
  modified_base 3: mod_base = OTHER; note = 2'-O-methylguanosine-3'-phosphate
  modified_base 4: mod_base = OTHER; note = 2'-O-methylcytidine-3'-phosphate
  modified_base 5: mod_base = OTHER; note = 2'-O-methylcytidine-3'-phosphate
  modified_base 6: mod_base = OTHER; note = 2'-O-methylcytidine-3'-phosphate
  modified_base 7: mod_base = OTHER; note = 2'-deoxy-2'-fluorouridine-3'-phosphate
  modified_base 8: mod_base = OTHER; note = 2'-O-methyluridine-3'-phosphate
  modified_base 9: mod_base = OTHER; note = 2'-deoxy-2'-fluorocytidine-3'-phosphate
  modified_base 10: mod_base = OTHER; note = 2'-deoxy-2'-fluorouridine-3'-phosphate
  modified_base 11: mod_base = OTHER; note = 2'-deoxy-2'-fluorocytidine-3'-phosphate
  modified_base 12: mod_base = OTHER; note = 2'-O-methyluridine-3'-phosphate
  modified_base 13: mod_base = OTHER; note = 2'-O-methyladenosine-3'-phosphate
  modified_base 14: mod_base = OTHER; note = 2'-O-methylcytidine-3'-phosphate
  modified_base 15: mod_base = OTHER; note = 2'-O-methyladenosine-3'-phosphate
  modified_base 16: mod_base = OTHER; note = 2'-O-methyladenosine-3'-phosphate
  modified_base 17: mod_base = OTHER; note = 2'-O-methyluridine-3'-phosphate
  modified_base 18: mod_base = OTHER; note = 2'-O-methyluridine-3'-phosphate
  modified_base 19: mod_base = OTHER; note = 2'-O-methyladenosine-3'-phosphate
  modified_base 20: mod_base = OTHER; note = 2'-O-methylcytidine-3'-phosphate
  modified_base 21: mod_base = OTHER; note 2'-O-methyluridine-3'-phosphate-N-[tris(GalNAc-alkyl)-amido decanoyl)]-4-hydroxyprolinol (Hyp-(GalNAc-alkyl)3)
gagcccttctctacaattact

SEQ ID NO: 137 - RNA, 21 nt, synthetic construct
  source 1..21: mol_type = other RNA
  modified_base 1: mod_base = OTHER; note = 2'-O-methylguanosine-3'-phosphorothioate
  modified_base 2: mod_base = OTHER; note = 2'-O-methyladenosine-3'-phosphorothioate
  modified_base 3: mod_base = OTHER; note = 2'-O-methylguanosine-3'-phosphate
  modified_base 4: mod_base = OTHER; note = 2'-O-methylcytidine-3'-phosphate
  modified_base 5: mod_base = OTHER; note = 2'-O-methylcytidine-3'-phosphate
  modified_base 6: mod_base = OTHER; note = 2'-O-methylguanosine-3'-phosphate
  modified_base 7: mod_base = OTHER; note = 2'-O-methyluridine-3'-phosphate
  modified_base 8: mod_base = OTHER; note = 2'-O-methyluridine-3'-phosphate
  modified_base 9: mod_base = OTHER; note = 2'-deoxy-2'-fluorocytidine-3'-phosphate
  modified_base 10: mod_base = OTHER; note = 2'-deoxy-2'-fluorouridine-3'-phosphate
  modified_base 11: mod_base = OTHER; note = 2'-deoxy-2'-fluorocytidine-3'-phosphate
  modified_base 12: mod_base = OTHER; note = 2'-O-methyluridine-3'-phosphate
  modified_base 13: mod_base = OTHER; note = 2'-O-methyladenosine-3'-phosphate
  modified_base 14: mod_base = OTHER; note = 2'-O-methylcytidine-3'-phosphate
  modified_base 15: mod_base = OTHER; note = 2'-O-methyladenosine-3'-phosphate
  modified_base 16: mod_base = OTHER; note = 2'-O-methyladenosine-3'-phosphate
  modified_base 17: mod_base = OTHER; note = 2'-O-methyluridine-3'-phosphate
  modified_base 18: mod_base = OTHER; note = 2'-O-methyluridine-3'-phosphate
  modified_base 19: mod_base = OTHER; note = 2'-O-methyladenosine-3'-phosphate
  modified_base 20: mod_base = OTHER; note = 2'-O-methylcytidine-3'-phosphate
  modified_base 21: mod_base = OTHER; note 2'-O-methyluridine-3'-phosphate-N-[tris(GalNAc-alkyl)-amido decanoyl)]-4-hydroxyprolinol (Hyp-(GalNAc-alkyl)3)
gagccgttctctacaattact

SEQ ID NO: 138 - RNA, 21 nt, synthetic construct
  source 1..21: mol_type = other RNA
  modified_base 1: mod_base = OTHER; note = 2'-O-methylguanosine-3'-phosphorothioate
  modified_base 2: mod_base = OTHER; note = 2'-O-methyladenosine-3'-phosphorothioate
  modified_base 3: mod_base = OTHER; note = 2'-O-methylguanosine-3'-phosphate
  modified_base 4: mod_base = OTHER; note = 2'-O-methylcytidine-3'-phosphate
  modified_base 5: mod_base = OTHER; note = 2'-O-methylcytidine-3'-phosphate
  modified_base 6: mod_base = OTHER; note = 2'-O-methylguanosine-3'-phosphate
  modified_base 7: mod_base = OTHER; note = 2'-O-methyluridine-3'-phosphate
  modified_base 8: mod_base = OTHER; note = 2'-O-methyluridine-3'-phosphate
  modified_base 9: mod_base = OTHER; note = 2'-deoxy-2'-fluorocytidine-3'-phosphate
  modified_base 10: mod_base = OTHER; note = 2'-deoxy-2'-fluorouridine-3'-phosphate
  modified_base 11: mod_base = OTHER; note = 2'-deoxy-2'-fluorocytidine-3'-phosphate
  modified_base 12: mod_base = OTHER; note = 2'-O-methyluridine-3'-phosphate
  modified_base 13: mod_base = OTHER; note = 2'-O-methyladenosine-3'-phosphate
  modified_base 14: mod_base = OTHER; note = 2'-O-methylcytidine-3'-phosphate
  modified_base 15: mod_base = OTHER; note = 2'-O-methyladenosine-3'-phosphate
  modified_base 16: mod_base = OTHER; note = 2'-O-methyladenosine-3'-phosphate
  modified_base 17: mod_base = OTHER; note = 2'-O-methyluridine-3'-phosphate
  modified_base 18: mod_base = OTHER; note = 2'-O-methyluridine-3'-phosphate
  modified_base 19: mod_base = OTHER; note = 2'-O-methyladenosine-3'-phosphate
  modified_base 20: mod_base = OTHER; note = 2'-O-methylcytidine-3'-phosphate
  modified_base 21: mod_base = OTHER; note 2'-O-methyladenosine3'-phosphate-N-[tris(GalNAc-alkyl)-amid odecanoyl)]-4-hydroxyprolinol (Hyp-(GalNAc-alkyl)3)
gagccgttctctacaattaca

SEQ ID NO: 139 - RNA, 21 nt, synthetic construct
  source 1..21: mol_type = other RNA
  modified_base 1: mod_base = OTHER; note = 2'-O-methylguanosine-3'-phosphorothioate
  modified_base 2: mod_base = OTHER; note = 2'-O-methyladenosine-3'-phosphorothioate
  modified_base 3: mod_base = OTHER; note = 2'-O-methylguanosine-3'-phosphate
  modified_base 4: mod_base = OTHER; note = 2'-O-methylcytidine-3'-phosphate
  modified_base 5: mod_base = OTHER; note = 2'-O-methylguanosine-3'-phosphate
  modified_base 6: mod_base = OTHER; note = 2'-O-methylguanosine-3'-phosphate
  modified_base 7: mod_base = OTHER; note = 2'-O-methyluridine-3'-phosphate
  modified_base 8: mod_base = OTHER; note = 2'-O-methyluridine-3'-phosphate
  modified_base 9: mod_base = OTHER; note = 2'-deoxy-2'-fluorocytidine-3'-phosphate
  modified_base 10: mod_base = OTHER; note = 2'-deoxy-2'-fluorouridine-3'-phosphate
  modified_base 11: mod_base = OTHER; note = 2'-deoxy-2'-fluorocytidine-3'-phosphate
  modified_base 12: mod_base = OTHER; note = 2'-O-methyluridine-3'-phosphate
  modified_base 13: mod_base = OTHER; note = 2'-O-methyladenosine-3'-phosphate
  modified_base 14: mod_base = OTHER; note = 2'-O-methylcytidine-3'-phosphate
  modified_base 15: mod_base = OTHER; note = 2'-O-methyladenosine-3'-phosphate
  modified_base 16: mod_base = OTHER; note = 2'-O-methyladenosine-3'-phosphate
  modified_base 17: mod_base = OTHER; note = 2'-O-methyluridine-3'-phosphate
  modified_base 18: mod_base = OTHER; note = 2'-O-methyluridine-3'-phosphate
  modified_base 19: mod_base = OTHER; note = 2'-O-methyladenosine-3'-phosphate
  modified_base 20: mod_base = OTHER; note = 2'-O-methylcytidine-3'-phosphate
  modified_base 21: mod_base = OTHER; note 2'-O-methyluridine-3'-phosphate-N-[tris(GalNAc-alkyl)-amido decanoyl)]-4-hydroxyprolinol (Hyp-(GalNAc-alkyl)3)
gagcggttctctacaattact

SEQ ID NO: 140 - RNA, 21 nt, synthetic construct
  source 1..21: mol_type = other RNA
  modified_base 1: mod_base = OTHER; note = 2'-O-methylguanosine-3'-phosphorothioate
  modified_base 2: mod_base = OTHER; note = 2'-O-methyladenosine-3'-phosphorothioate
  modified_base 3: mod_base = OTHER; note = 2'-O-methylguanosine-3'-phosphate
  modified_base 4: mod_base = OTHER; note = 2'-O-methylguanosine-3'-phosphate
  modified_base 5: mod_base = OTHER; note = 2'-O-methylcytidine-3'-phosphate
  modified_base 6: mod_base = OTHER; note = 2'-O-methylguanosine-3'-phosphate
  modified_base 7: mod_base = OTHER; note = 2'-O-methyluridine-3'-phosphate
  modified_base 8: mod_base = OTHER; note = 2'-O-methyluridine-3'-phosphate
  modified_base 9: mod_base = OTHER; note = 2'-deoxy-2'-fluorocytidine-3'-phosphate
  modified_base 10: mod_base = OTHER; note = 2'-deoxy-2'-fluorouridine-3'-phosphate
  modified_base 11: mod_base = OTHER; note = 2'-deoxy-2'-fluorocytidine-3'-phosphate
  modified_base 12: mod_base = OTHER; note = 2'-O-methyluridine-3'-phosphate
  modified_base 13: mod_base = OTHER; note = 2'-O-methyladenosine-3'-phosphate
  modified_base 14: mod_base = OTHER; note = 2'-O-methylcytidine-3'-phosphate
  modified_base 15: mod_base = OTHER; note = 2'-O-methyladenosine-3'-phosphate
  modified_base 16: mod_base = OTHER; note = 2'-O-methyladenosine-3'-phosphate
  modified_base 17: mod_base = OTHER; note = 2'-O-methyluridine-3'-phosphate
  modified_base 18: mod_base = OTHER; note = 2'-O-methyluridine-3'-phosphate
  modified_base 19: mod_base = OTHER; note = 2'-O-methyladenosine-3'-phosphate
  modified_base 20: mod_base = OTHER; note = 2'-O-methylcytidine-3'-phosphate
  modified_base 21: mod_base = OTHER; note 2'-O-methyluridine-3'-phosphate-N-[tris(GalNAc-alkyl)-amido decanoyl)]-4-hydroxyprolinol (Hyp-(GalNAc-alkyl)3)
gaggcgttctctacaattact

SEQ ID NO: 141 - RNA, 21 nt, synthetic construct
  source 1..21: mol_type = other RNA
  modified_base 1: mod_base = OTHER; note = 2'-O-methylguanosine-3'-phosphorothioate
  modified_base 2: mod_base = OTHER; note = 2'-O-methyladenosine-3'-phosphorothioate
  modified_base 3: mod_base = OTHER; note = 2'-O-methylcytidine-3'-phosphate
  modified_base 4: mod_base = OTHER; note = 2'-O-methylcytidine-3'-phosphate
  modified_base 5: mod_base = OTHER; note = 2'-O-methylcytidine-3'-phosphate
  modified_base 6: mod_base = OTHER; note = 2'-O-methylguanosine-3'-phosphate
  modified_base 7: mod_base = OTHER; note = 2'-O-methyluridine-3'-phosphate
  modified_base 8: mod_base = OTHER; note = 2'-O-methyluridine-3'-phosphate
  modified_base 9: mod_base = OTHER; note = 2'-deoxy-2'-fluorocytidine-3'-phosphate
  modified_base 10: mod_base = OTHER; note = 2'-deoxy-2'-fluorouridine-3'-phosphate
  modified_base 11: mod_base = OTHER; note = 2'-deoxy-2'-fluorocytidine-3'-phosphate
  modified_base 12: mod_base = OTHER; note = 2'-O-methyluridine-3'-phosphate
  modified_base 13: mod_base = OTHER; note = 2'-O-methyladenosine-3'-phosphate
  modified_base 14: mod_base = OTHER; note = 2'-O-methylcytidine-3'-phosphate
  modified_base 15: mod_base = OTHER; note = 2'-O-methyladenosine-3'-phosphate
  modified_base 16: mod_base = OTHER; note = 2'-O-methyladenosine-3'-phosphate
  modified_base 17: mod_base = OTHER; note = 2'-O-methyluridine-3'-phosphate
  modified_base 18: mod_base = OTHER; note = 2'-O-methyluridine-3'-phosphate
  modified_base 19: mod_base = OTHER; note = 2'-O-methyladenosine-3'-phosphate
  modified_base 20: mod_base = OTHER; note = 2'-O-methylcytidine-3'-phosphate
  modified_base 21: mod_base = OTHER; note 2'-O-methyluridine-3'-phosphate-N-[tris(GalNAc-alkyl)-amido decanoyl)]-4-hydroxyprolinol (Hyp-(GalNAc-alkyl)3)
gacccgttctctacaattact

SEQ ID NO: 142 - RNA, 21 nt, synthetic construct
  source 1..21: mol_type = other RNA
  modified_base 1: mod_base = OTHER; note = 2'-O-methylguanosine-3'-phosphorothioate
  modified_base 2: mod_base = OTHER; note = 2'-O-methyladenosine-3'-phosphorothioate
  modified_base 3: mod_base = OTHER; note = 2'-O-methylguanosine-3'-phosphate
  modified_base 4: mod_base = OTHER; note = 2'-O-methylcytidine-3'-phosphate
  modified_base 5: mod_base = OTHER; note = 2'-O-methylcytidine-3'-phosphate
  modified_base 6: mod_base = OTHER; note = 2'-O-methylguanosine-3'-phosphate
  modified_base 7: mod_base = OTHER; note = 2'-O-methyluridine-3'-phosphate
  modified_base 8: mod_base = OTHER; note = 2'-O-methyluridine-3'-phosphate
  modified_base 9: mod_base = OTHER; note = 2'-deoxy-2'-fluorocytidine-3'-phosphate
  modified_base 10: mod_base = OTHER; note = 2'-deoxy-2'-fluorouridine-3'-phosphate
  modified_base 11: mod_base = OTHER; note = 2'-deoxy-2'-fluorocytidine-3'-phosphate
  modified_base 12: mod_base = OTHER; note = 2'-O-methyluridine-3'-phosphate
  modified_base 13: mod_base = OTHER; note = 2'-O-methyladenosine-3'-phosphate
  modified_base 14: mod_base = OTHER; note = 2'-O-methylcytidine-3'-phosphate
  modified_base 15: mod_base = OTHER; note = 2'-O-methyladenosine-3'-phosphate
  modified_base 16: mod_base = OTHER; note = 2'-O-methyladenosine-3'-phosphate
  modified_base 17: mod_base = OTHER; note = 2'-O-methyluridine-3'-phosphate
  modified_base 18: mod_base = OTHER; note = 2'-O-methyluridine-3'-phosphate
  modified_base 19: mod_base = OTHER; note = 2'-O-methyladenosine-3'-phosphate
  modified_base 20: mod_base = OTHER; note = 2'-O-methylcytidine-3'-phosphate
  modified_base 21: mod_base = OTHER; note 2'-O-methyluridine-3'-phosphate-N-[tris(GalNAc-alkyl)-amido decanoyl)]-4-hydroxyprolinol (Hyp-(GalNAc-alkyl)3)
gagccgttctctacaattact

SEQ ID NO: 143 - RNA, 21 nt, synthetic construct
  source 1..21: mol_type = other RNA
  modified_base 1: mod_base = OTHER; note = 2'-O-methylguanosine-3'-phosphorothioate
  modified_base 2: mod_base = OTHER; note = 2'-O-methyladenosine-3'-phosphorothioate
  modified_base 3: mod_base = OTHER; note = 2'-O-methylguanosine-3'-phosphate
  modified_base 4: mod_base = OTHER; note = 2'-O-methylcytidine-3'-phosphate
  modified_base 5: mod_base = OTHER; note = 2'-O-methylcytidine-3'-phosphate
  modified_base 6: mod_base = OTHER; note = 2'-O-methylguanosine-3'-phosphate
  modified_base 7: mod_base = OTHER; note = 2'-O-methyluridine-3'-phosphate
  modified_base 8: mod_base = OTHER; note = 2'-O-methyluridine-3'-phosphate
  modified_base 9: mod_base = OTHER; note = 2'-deoxy-2'-fluorocytidine-3'-phosphate
  modified_base 10: mod_base = OTHER; note = 2'-deoxy-2'-fluorouridine-3'-phosphate
  modified_base 11: mod_base = OTHER; note = 2'-deoxy-2'-fluorocytidine-3'-phosphate
  modified_base 12: mod_base = OTHER; note = 2'-O-methyluridine-3'-phosphate
  modified_base 13: mod_base = OTHER; note = 2'-O-methyladenosine-3'-phosphate
  modified_base 14: mod_base = OTHER; note = 2'-O-methylcytidine-3'-phosphate
  modified_base 15: mod_base = OTHER; note = 2'-O-methyladenosine-3'-phosphate
  modified_base 16: mod_base = OTHER; note = 2'-O-methyladenosine-3'-phosphate
  modified_base 17: mod_base = OTHER; note = 2'-O-methyluridine-3'-phosphate
  modified_base 18: mod_base = OTHER; note = 2'-O-methyluridine-3'-phosphate
  modified_base 19: mod_base = OTHER; note = 2'-O-methyladenosine-3'-phosphate
  modified_base 20: mod_base = OTHER; note = 2'-O-methylcytidine-3'-phosphate
  modified_base 21: mod_base = OTHER; note 2'-O-methyluridine-3'-phosphate-N-[tris(GalNAc-alkyl)-amido decanoyl)]-4-hydroxyprolinol (Hyp-(GalNAc-alkyl)3)
gagccgttctctacaattact

SEQ ID NO: 144 - RNA, 21 nt, synthetic construct
  source 1..21: mol_type = other RNA
  modified_base 1: mod_base = OTHER; note = 2'-O-methylguanosine-3'-phosphorothioate
  modified_base 2: mod_base = OTHER; note = 2'-O-methyladenosine-3'-phosphorothioate
  modified_base 3: mod_base = OTHER; note = 2'-O-methylguanosine-3'-phosphate
  modified_base 4: mod_base = OTHER; note = 2'-O-methylcytidine-3'-phosphate
  modified_base 5: mod_base = OTHER; note = 2'-O-methylcytidine-3'-phosphate
  modified_base 6: mod_base = OTHER; note = 2'-O-methylguanosine-3'-phosphate
  modified_base 7: mod_base = OTHER; note = 2'-O-methyluridine-3'-phosphate
  modified_base 8: mod_base = OTHER; note = 2'-O-methyluridine-3'-phosphate
  modified_base 9: mod_base = OTHER; note = 2'-deoxy-2'-fluorocytidine-3'-phosphate
  modified_base 10: mod_base = OTHER; note = 2'-deoxy-2'-fluorouridine-3'-phosphate
  modified_base 11: mod_base = OTHER; note = 2'-deoxy-2'-fluorocytidine-3'-phosphate
  modified_base 12: mod_base = OTHER; note = 2'-O-methyluridine-3'-phosphate
  modified_base 13: mod_base = OTHER; note = 2'-O-methyladenosine-3'-phosphate
  modified_base 14: mod_base = OTHER; note = 2'-O-methylcytidine-3'-phosphate
  modified_base 15: mod_base = OTHER; note = 2'-O-methyladenosine-3'-phosphate
  modified_base 16: mod_base = OTHER; note = 2'-O-methyladenosine-3'-phosphate
  modified_base 17: mod_base = OTHER; note = 2'-O-methyluridine-3'-phosphate
  modified_base 18: mod_base = OTHER; note = 2'-O-methyluridine-3'-phosphate
  modified_base 19: mod_base = OTHER; note = 2'-O-methyladenosine-3'-phosphate
  modified_base 20: mod_base = OTHER; note = 2'-O-methylcytidine-3'-phosphate
  modified_base 21: mod_base = OTHER; note 2'-O-methyladenosine3'-phosphate-N-[tris(GalNAc-alkyl)-amid odecanoyl)]-4-hydroxyprolinol (Hyp-(GalNAc-alkyl)3)
gagccgttctctacaattaca

SEQ ID NO: 145 - RNA, 21 nt, synthetic construct
  source 1..21: mol_type = other RNA
  modified_base 1: mod_base = OTHER; note = 2'-O-methylguanosine-3'-phosphorothioate
  modified_base 2: mod_base = OTHER; note = 2'-O-methyladenosine-3'-phosphorothioate
  modified_base 3: mod_base = OTHER; note = 2'-O-methylguanosine-3'-phosphate
  modified_base 4: mod_base = OTHER; note = 2'-O-methylcytidine-3'-phosphate
  modified_base 5: mod_base = OTHER; note = 2'-O-methylcytidine-3'-phosphate
  modified_base 6: mod_base = OTHER; note = 2'-O-methylguanosine-3'-phosphate
  modified_base 7: mod_base = OTHER; note = 2'-O-methyluridine-3'-phosphate
  modified_base 8: mod_base = OTHER; note = 2'-O-methyluridine-3'-phosphate
  modified_base 9: mod_base = OTHER; note = 2'-deoxy-2'-fluorocytidine-3'-phosphate
  modified_base 10: mod_base = OTHER; note = 2'-deoxy-2'-fluorouridine-3'-phosphate
  modified_base 11: mod_base = OTHER; note = 2'-deoxy-2'-fluorocytidine-3'-phosphate
  modified_base 12: mod_base = OTHER; note = 2'-O-methyluridine-3'-phosphate
  modified_base 13: mod_base = OTHER; note = 2'-O-methyladenosine-3'-phosphate
  modified_base 14: mod_base = OTHER; note = 2'-O-methylcytidine-3'-phosphate
  modified_base 15: mod_base = OTHER; note = 2'-O-methyladenosine-3'-phosphate
  modified_base 16: mod_base = OTHER; note = 2'-O-methyladenosine-3'-phosphate
  modified_base 17: mod_base = OTHER; note = 2'-O-methyluridine-3'-phosphate
  modified_base 18: mod_base = OTHER; note = 2'-O-methyluridine-3'-phosphate
  modified_base 19: mod_base = OTHER; note = 2'-O-methyladenosine-3'-phosphate
  modified_base 20: mod_base = OTHER; note = 2'-O-methylcytidine-3'-phosphate
  modified_base 21: mod_base = OTHER; note 2'-O-methyluridine-3'-phosphate-N-[tris(GalNAc-alkyl)-amido decanoyl)]-4-hydroxyprolinol (Hyp-(GalNAc-alkyl)3)
gagccgttctctacaattact

SEQ ID NO: 146 - RNA, 21 nt, synthetic construct
  source 1..21: mol_type = other RNA
  modified_base 1: mod_base = OTHER; note = 2'-O-methylguanosine-3'-phosphorothioate
  modified_base 2: mod_base = OTHER; note = 2'-O-methyladenosine-3'-phosphorothioate
  modified_base 3: mod_base = OTHER; note = 2'-O-methylguanosine-3'-phosphate
  modified_base 4: mod_base = OTHER; note = 2'-O-methylcytidine-3'-phosphate
  modified_base 5: mod_base = OTHER; note = 2'-O-methylcytidine-3'-phosphate
  modified_base 6: mod_base = OTHER; note = 2'-O-methylguanosine-3'-phosphate
  modified_base 7: mod_base = OTHER; note = 2'-O-methyluridine-3'-phosphate
  modified_base 8: mod_base = OTHER; note = 2'-O-methyluridine-3'-phosphate
  modified_base 9: mod_base = OTHER; note = 2'-deoxy-2'-fluorocytidine-3'-phosphate
  modified_base 10: mod_base = OTHER; note = 2'-deoxy-2'-fluorouridine-3'-phosphate
  modified_base 11: mod_base = OTHER; note = 2'-deoxy-2'-fluorocytidine-3'-phosphate
  modified_base 12: mod_base = OTHER; note = 2'-O-methyluridine-3'-phosphate
  modified_base 13: mod_base = OTHER; note = 2'-O-methyladenosine-3'-phosphate
  modified_base 14: mod_base = OTHER; note = 2'-O-methylcytidine-3'-phosphate
  modified_base 15: mod_base = OTHER; note = 2'-O-methyladenosine-3'-phosphate
  modified_base 16: mod_base = OTHER; note = 2'-O-methyladenosine-3'-phosphate
  modified_base 17: mod_base = OTHER; note = 2'-O-methyluridine-3'-phosphate
  modified_base 18: mod_base = OTHER; note = 2'-O-methyluridine-3'-phosphate
  modified_base 19: mod_base = OTHER; note = 2'-O-methyladenosine-3'-phosphate
  modified_base 20: mod_base = OTHER; note = 2'-O-methylcytidine-3'-phosphate
  modified_base 21: mod_base = OTHER; note 2'-O-methyluridine-3'-phosphate-N-[tris(GalNAc-alkyl)-amido decanoyl)]-4-hydroxyprolinol (Hyp-(GalNAc-alkyl)3)
gagccgttctctacaattact

SEQ ID NO: 147 - RNA, 21 nt, synthetic construct
  source 1..21: mol_type = other RNA
  modified_base 1: mod_base = OTHER; note = 2'-O-methylguanosine-3'-phosphorothioate
  modified_base 2: mod_base = OTHER; note = 2'-O-methyladenosine-3'-phosphorothioate
  modified_base 3: mod_base = OTHER; note = 2'-O-methylguanosine-3'-phosphate
  modified_base 4: mod_base = OTHER; note = 2'-O-methylcytidine-3'-phosphate
  modified_base 5: mod_base = OTHER; note = 2'-O-methylcytidine-3'-phosphate
  modified_base 6: mod_base = OTHER; note = 2'-O-methylguanosine-3'-phosphate
  modified_base 7: mod_base = OTHER; note = 2'-O-methyluridine-3'-phosphate
  modified_base 8: mod_base = OTHER; note = 2'-O-methyluridine-3'-phosphate
  modified_base 9: mod_base = OTHER; note = 2'-deoxy-2'-fluorocytidine-3'-phosphate
  modified_base 10: mod_base = OTHER; note = 2'-deoxy-2'-fluorouridine-3'-phosphate
  modified_base 11: mod_base = OTHER; note = 2'-deoxy-2'-fluorocytidine-3'-phosphate
  modified_base 12: mod_base = OTHER; note = 2'-O-methyluridine-3'-phosphate
  modified_base 13: mod_base = OTHER; note = 2'-O-methyladenosine-3'-phosphate
  modified_base 14: mod_base = OTHER; note = 2'-O-methylcytidine-3'-phosphate
  modified_base 15: mod_base = OTHER; note = 2'-O-methyladenosine-3'-phosphate
  modified_base 16: mod_base = OTHER; note = 2'-O-methyladenosine-3'-phosphate
  modified_base 17: mod_base = OTHER; note = 2'-O-methyluridine-3'-phosphate
  modified_base 18: mod_base = OTHER; note = 2'-O-methyluridine-3'-phosphate
  modified_base 19: mod_base = OTHER; note = 2'-O-methyladenosine-3'-phosphate
  modified_base 20: mod_base = OTHER; note = 2'-O-methylcytidine-3'-phosphate
  modified_base 21: mod_base = OTHER; note 2'-O-methyluridine-3'-phosphate-N-[tris(GalNAc-alkyl)-amido decanoyl)]-4-hydroxyprolinol (Hyp-(GalNAc-alkyl)3)
gagccgttctctacaattact

SEQ ID NO: 148 - RNA, 21 nt, synthetic construct
  source 1..21: mol_type = other RNA
  modified_base 1: mod_base = OTHER; note = 2'-O-methylguanosine-3'-phosphorothioate
  modified_base 2: mod_base = OTHER; note = 2'-O-methyladenosine-3'-phosphorothioate
  modified_base 3: mod_base = OTHER; note = 2'-O-methylguanosine-3'-phosphate
  modified_base 4: mod_base = OTHER; note = 2'-O-methylcytidine-3'-phosphate
  modified_base 5: mod_base = OTHER; note = 2'-O-methylcytidine-3'-phosphate
  modified_base 6: mod_base = OTHER; note = 2'-O-methylguanosine-3'-phosphate
  modified_base 7: mod_base = OTHER; note = 2'-O-methyluridine-3'-phosphate
  modified_base 8: mod_base = OTHER; note = 2'-O-methyluridine-3'-phosphate
  modified_base 9: mod_base = OTHER; note = 2'-deoxy-2'-fluorocytidine-3'-phosphate
  modified_base 10: mod_base = OTHER; note = 2'-deoxy-2'-fluorouridine-3'-phosphate
  modified_base 11: mod_base = OTHER; note = 2'-deoxy-2'-fluorocytidine-3'-phosphate
  modified_base 12: mod_base = OTHER; note = 2'-O-methyluridine-3'-phosphate
  modified_base 13: mod_base = OTHER; note = 2'-O-methyladenosine-3'-phosphate
  modified_base 14: mod_base = OTHER; note = 2'-O-methylcytidine-3'-phosphate
  modified_base 15: mod_base = OTHER; note = 2'-O-methyladenosine-3'-phosphate
  modified_base 16: mod_base = OTHER; note = 2'-O-methyladenosine-3'-phosphate
  modified_base 17: mod_base = OTHER; note = 2'-O-methyluridine-3'-phosphate
  modified_base 18: mod_base = OTHER; note = 2'-O-methyluridine-3'-phosphate
  modified_base 19: mod_base = OTHER; note = 2'-O-methyladenosine-3'-phosphate
  modified_base 20: mod_base = OTHER; note = 2'-O-methylcytidine-3'-phosphate
  modified_base 21: mod_base = OTHER; note 2'-O-methyluridine-3'-phosphate-N-[tris(GalNAc-alkyl)-amido decanoyl)]-4-hydroxyprolinol (Hyp-(GalNAc-alkyl)3)
gagccgttctctacaattact

SEQ ID NO: 149 - RNA, 21 nt, synthetic construct
  source 1..21: mol_type = other RNA
  modified_base 1: mod_base = OTHER; note = 2'-O-methylguanosine-3'-phosphorothioate
  modified_base 2: mod_base = OTHER; note = 2'-O-methyladenosine-3'-phosphorothioate
  modified_base 3: mod_base = OTHER; note = 2'-O-methylguanosine-3'-phosphate
  modified_base 4: mod_base = OTHER; note = 2'-O-methyladenosine-3'-phosphate
  modified_base 5: mod_base = OTHER; note = 2'-O-methyladenosine-3'-phosphate
  modified_base 6: mod_base = OTHER; note = 2'-O-methyladenosine-3'-phosphate
  modified_base 7: mod_base = OTHER; note = 2'-O-methyluridine-3'-phosphate
  modified_base 8: mod_base = OTHER; note = 2'-O-methyluridine-3'-phosphate
  modified_base 9: mod_base = OTHER; note = 2'-deoxy-2'-fluorocytidine-3'-phosphate
  modified_base 10: mod_base = OTHER; note = 2'-deoxy-2'-fluorouridine-3'-phosphate
  modified_base 11: mod_base = OTHER; note = 2'-deoxy-2'-fluoroadenosine-3'-phosphate
  modified_base 12: mod_base = OTHER; note = 2'-O-methylcytidine-3'-phosphate
  modified_base 13: mod_base = OTHER; note = 2'-O-methyluridine-3'-phosphate
  modified_base 14: mod_base = OTHER; note = 2'-O-methyladenosine-3'-phosphate
  modified_base 15: mod_base = OTHER; note = 2'-O-methylcytidine-3'-phosphate
  modified_base 16: mod_base = OTHER; note = 2'-O-methyladenosine-3'-phosphate
  modified_base 17: mod_base = OTHER; note = 2'-O-methyluridine-3'-phosphate
  modified_base 18: mod_base = OTHER; note = 2'-O-methylcytidine-3'-phosphate
  modified_base 19: mod_base = OTHER; note = 2'-O-methyluridine-3'-phosphate
  modified_base 20: mod_base = OTHER; note = 2'-O-methyladenosine-3'-phosphate
  modified_base 21: mod_base = OTHER; note 2'-O-methyluridine-3'-phosphate-N-[tris(GalNAc-alkyl)-amido decanoyl)]-4-hydroxyprolinol (Hyp-(GalNAc-alkyl)3)
gagaaattctactacatctat

SEQ ID NO: 150 - RNA, 21 nt, synthetic construct
  source 1..21: mol_type = other RNA
  modified_base 1: mod_base = OTHER; note = 2'-O-methylguanosine-3'-phosphorothioate
  modified_base 2: mod_base = OTHER; note = 2'-O-methyladenosine-3'-phosphorothioate
  modified_base 3: mod_base = OTHER; note = 2'-O-methylguanosine-3'-phosphate
  modified_base 4: mod_base = OTHER; note = 2'-O-methyladenosine-3'-phosphate
  modified_base 5: mod_base = OTHER; note = 2'-O-methyladenosine-3'-phosphate
  modified_base 6: mod_base = OTHER; note = 2'-O-methyladenosine-3'-phosphate
  modified_base 7: mod_base = OTHER; note = 2'-O-methyluridine-3'-phosphate
  modified_base 8: mod_base = OTHER; note = 2'-O-methyluridine-3'-phosphate
  modified_base 9: mod_base = OTHER; note = 2'-deoxy-2'-fluorocytidine-3'-phosphate
  modified_base 10: mod_base = OTHER; note = 2'-deoxy-2'-fluorouridine-3'-phosphate
  modified_base 11: mod_base = OTHER; note = 2'-deoxy-2'-fluoroadenosine-3'-phosphate
  modified_base 12: mod_base = OTHER; note = 2'-O-methylcytidine-3'-phosphate
  modified_base 13: mod_base = OTHER; note = 2'-O-methyluridine-3'-phosphate
  modified_base 14: mod_base = OTHER; note = 2'-O-methyladenosine-3'-phosphate
  modified_base 15: mod_base = OTHER; note = 2'-O-methylcytidine-3'-phosphate
  modified_base 16: mod_base = OTHER; note = 2'-O-methyladenosine-3'-phosphate
  modified_base 17: mod_base = OTHER; note = 2'-O-methyluridine-3'-phosphate
  modified_base 18: mod_base = OTHER; note = 2'-O-methylcytidine-3'-phosphate
  modified_base 19: mod_base = OTHER; note = 2'-O-methyluridine-3'-phosphate
  modified_base 20: mod_base = OTHER; note = 2'-O-methyladenosine-3'-phosphate
  modified_base 21: mod_base = OTHER; note 2'-O-methyladenosine3'-phosphate-N-[tris(GalNAc-alkyl)-amid odecanoyl)]-4-hydroxyprolinol (Hyp-(GalNAc-alkyl)3)
gagaaattctactacatctaa

SEQ ID NO: 151 - RNA, 21 nt, synthetic construct
  source 1..21: mol_type = other RNA
  modified_base 1: mod_base = OTHER; note = 2'-O-methylguanosine-3'-phosphorothioate
  modified_base 2: mod_base = OTHER; note = 2'-O-methyladenosine-3'-phosphorothioate
  modified_base 3: mod_base = OTHER; note = 2'-O-methylguanosine-3'-phosphate
  modified_base 4: mod_base = OTHER; note = 2'-O-methyladenosine-3'-phosphate
  modified_base 5: mod_base = OTHER; note = 2'-O-methyladenosine-3'-phosphate
  modified_base 6: mod_base = OTHER; note = 2'-O-methyladenosine-3'-phosphate
  modified_base 7: mod_base = OTHER; note = 2'-O-methyluridine-3'-phosphate
  modified_base 8: mod_base = OTHER; note = 2'-O-methyluridine-3'-phosphate
  modified_base 9: mod_base = OTHER; note = 2'-deoxy-2'-fluorocytidine-3'-phosphate
  modified_base 10: mod_base = OTHER; note = 2'-deoxy-2'-fluorouridine-3'-phosphate
  modified_base 11: mod_base = OTHER; note = 2'-deoxy-2'-fluoroadenosine-3'-phosphate
  modified_base 12: mod_base = OTHER; note = 2'-O-methylcytidine-3'-phosphate
  modified_base 13: mod_base = OTHER; note = 2'-O-methyluridine-3'-phosphate
  modified_base 14: mod_base = OTHER; note = 2'-O-methyladenosine-3'-phosphate
  modified_base 15: mod_base = OTHER; note = 2'-O-methylcytidine-3'-phosphate
  modified_base 16: mod_base = OTHER; note = 2'-O-methyladenosine-3'-phosphate
  modified_base 17: mod_base = OTHER; note = 2'-O-methyluridine-3'-phosphate
  modified_base 18: mod_base = OTHER; note = 2'-O-methylcytidine-3'-phosphate
  modified_base 19: mod_base = OTHER; note = 2'-O-methyluridine-3'-phosphate
  modified_base 20: mod_base = OTHER; note = 2'-O-methyladenosine-3'-phosphate
  modified_base 21: mod_base = OTHER; note 2'-O-methyluridine-3'-phosphate-N-[tris(GalNAc-alkyl)-amido decanoyl)]-4-hydroxyprolinol (Hyp-(GalNAc-alkyl)3)
gagaaattctactacatctat

SEQ ID NO: 152 - RNA, 19 nt, synthetic construct
  source 1..19: mol_type = other RNA
  modified_base 1: mod_base = OTHER; note = 2'-O-methylguanosine-3'-phosphorothioate
  modified_base 2: mod_base = OTHER; note = 2'-O-methyladenosine-3'-phosphorothioate
  modified_base 3: mod_base = OTHER; note = 2'-O-methyladenosine-3'-phosphate
  modified_base 4: mod_base = OTHER; note = 2'-O-methyladenosine-3'-phosphate
  modified_base 5: mod_base = OTHER; note = 2'-O-methyluridine-3'-phosphate
  modified_base 6: mod_base = OTHER; note = 2'-O-methyluridine-3'-phosphate
  modified_base 7: mod_base = OTHER; note = 2'-deoxy-2'-fluorocytidine-3'-phosphate
  modified_base 8: mod_base = OTHER; note = 2'-deoxy-2'-fluorouridine-3'-phosphate
  modified_base 9: mod_base = OTHER; note = 2'-deoxy-2'-fluoroadenosine-3'-phosphate
  modified_base 10: mod_base = OTHER; note = 2'-O-methylcytidine-3'-phosphate
  modified_base 11: mod_base = OTHER; note = 2'-O-methyluridine-3'-phosphate
  modified_base 12: mod_base = OTHER; note = 2'-O-methyladenosine-3'-phosphate
  modified_base 13: mod_base = OTHER; note = 2'-O-methylcytidine-3'-phosphate
  modified_base 14: mod_base = OTHER; note = 2'-O-methyladenosine-3'-phosphate
  modified_base 15: mod_base = OTHER; note = 2'-O-methyluridine-3'-phosphate
  modified_base 16: mod_base = OTHER; note = 2'-O-methylcytidine-3'-phosphate
  modified_base 17: mod_base = OTHER; note = 2'-O-methyluridine-3'-phosphate
  modified_base 18: mod_base = OTHER; note = 2'-O-methyladenosine-3'-phosphate
  modified_base 19: mod_base = OTHER; note 2'-O-methyluridine-3'-phosphate-N-[tris(GalNAc-alkyl)-amido decanoyl)]-4-hydroxyprolinol (Hyp-(GalNAc-alkyl)3)
gaaattctactacatctat

SEQ ID NO: 153 - RNA, 21 nt, synthetic construct
  source 1..21: mol_type = other RNA
  modified_base 1: mod_base = OTHER; note = 2'-O-methylguanosine-3'-phosphorothioate
  modified_base 2: mod_base = OTHER; note = 2'-O-methyladenosine-3'-phosphorothioate
  modified_base 3: mod_base = OTHER; note = 2'-O-methylguanosine-3'-phosphate
  modified_base 4: mod_base = OTHER; note = 2'-O-methyladenosine-3'-phosphate
  modified_base 5: mod_base = OTHER; note = 2'-O-methyluridine-3'-phosphate
  modified_base 6: mod_base = OTHER; note = 2'-O-methyladenosine-3'-phosphate
  modified_base 7: mod_base = OTHER; note = 2'-O-methyluridine-3'-phosphate
  modified_base 8: mod_base = OTHER; note = 2'-O-methyluridine-3'-phosphate
  modified_base 9: mod_base = OTHER; note = 2'-deoxy-2'-fluorocytidine-3'-phosphate
  modified_base 10: mod_base = OTHER; note = 2'-deoxy-2'-fluorouridine-3'-phosphate
  modified_base 11: mod_base = OTHER; note = 2'-deoxy-2'-fluoroadenosine-3'-phosphate
  modified_base 12: mod_base = OTHER; note = 2'-O-methylcytidine-3'-phosphate
  modified_base 13: mod_base = OTHER; note = 2'-O-methyluridine-3'-phosphate
  modified_base 14: mod_base = OTHER; note = 2'-O-methyladenosine-3'-phosphate
  modified_base 15: mod_base = OTHER; note = 2'-O-methylcytidine-3'-phosphate
  modified_base 16: mod_base = OTHER; note = 2'-O-methyladenosine-3'-phosphate
  modified_base 17: mod_base = OTHER; note = 2'-O-methyluridine-3'-phosphate
  modified_base 18: mod_base = OTHER; note = 2'-O-methylcytidine-3'-phosphate
  modified_base 19: mod_base = OTHER; note = 2'-O-methyluridine-3'-phosphate
  modified_base 20: mod_base = OTHER; note = 2'-O-methyladenosine-3'-phosphate
  modified_base 21: mod_base = OTHER; note 2'-O-methyluridine-3'-phosphate-N-[tris(GalNAc-alkyl)-amido decanoyl)]-4-hydroxyprolinol (Hyp-(GalNAc-alkyl)3)
gagatattctactacatctat

SEQ ID NO: 154 - RNA, 21 nt, synthetic construct
  source 1..21: mol_type = other RNA
  modified_base 1: mod_base = OTHER; note = 2'-O-methylguanosine-3'-phosphorothioate
  modified_base 2: mod_base = OTHER; note = 2'-O-methyladenosine-3'-phosphorothioate
  modified_base 3: mod_base = OTHER; note = 2'-O-methylguanosine-3'-phosphate
  modified_base 4: mod_base = OTHER; note = 2'-O-methyluridine-3'-phosphate
  modified_base 5: mod_base = OTHER; note = 2'-O-methyladenosine-3'-phosphate
  modified_base 6: mod_base = OTHER; note = 2'-O-methyladenosine-3'-phosphate
  modified_base 7: mod_base = OTHER; note = 2'-O-methyluridine-3'-phosphate
  modified_base 8: mod_base = OTHER; note = 2'-O-methyluridine-3'-phosphate
  modified_base 9: mod_base = OTHER; note = 2'-deoxy-2'-fluorocytidine-3'-phosphate
  modified_base 10: mod_base = OTHER; note = 2'-deoxy-2'-fluorouridine-3'-phosphate
  modified_base 11: mod_base = OTHER; note = 2'-deoxy-2'-fluoroadenosine-3'-phosphate
  modified_base 12: mod_base = OTHER; note = 2'-O-methylcytidine-3'-phosphate
  modified_base 13: mod_base = OTHER; note = 2'-O-methyluridine-3'-phosphate
  modified_base 14: mod_base = OTHER; note = 2'-O-methyladenosine-3'-phosphate
  modified_base 15: mod_base = OTHER; note = 2'-O-methylcytidine-3'-phosphate
  modified_base 16: mod_base = OTHER; note = 2'-O-methyladenosine-3'-phosphate
  modified_base 17: mod_base = OTHER; note = 2'-O-methyluridine-3'-phosphate
  modified_base 18: mod_base = OTHER; note = 2'-O-methylcytidine-3'-phosphate
  modified_base 19: mod_base = OTHER; note = 2'-O-methyluridine-3'-phosphate
  modified_base 20: mod_base = OTHER; note = 2'-O-methyladenosine-3'-phosphate
  modified_base 21: mod_base = OTHER; note 2'-O-methyluridine-3'-phosphate-N-[tris(GalNAc-alkyl)-amido decanoyl)]-4-hydroxyprolinol (Hyp-(GalNAc-alkyl)3)
gagtaattctactacatctat

SEQ ID NO: 155 - RNA, 21 nt, synthetic construct
  source 1..21: mol_type = other RNA
  modified_base 1: mod_base = OTHER; note = 2'-O-methylguanosine-3'-phosphorothioate
  modified_base 2: mod_base = OTHER; note = 2'-O-methyladenosine-3'-phosphorothioate
  modified_base 3: mod_base = OTHER; note = 2'-O-methylcytidine-3'-phosphate
  modified_base 4: mod_base = OTHER; note = 2'-O-methyladenosine-3'-phosphate
  modified_base 5: mod_base = OTHER; note = 2'-O-methyladenosine-3'-phosphate
  modified_base 6: mod_base = OTHER; note = 2'-O-methyladenosine-3'-phosphate
  modified_base 7: mod_base = OTHER; note = 2'-O-methyluridine-3'-phosphate
  modified_base 8: mod_base = OTHER; note = 2'-O-methyluridine-3'-phosphate
  modified_base 9: mod_base = OTHER; note = 2'-deoxy-2'-fluorocytidine-3'-phosphate
  modified_base 10: mod_base = OTHER; note = 2'-deoxy-2'-fluorouridine-3'-phosphate
  modified_base 11: mod_base = OTHER; note = 2'-deoxy-2'-fluoroadenosine-3'-phosphate
  modified_base 12: mod_base = OTHER; note = 2'-O-methylcytidine-3'-phosphate
  modified_base 13: mod_base = OTHER; note = 2'-O-methyluridine-3'-phosphate
  modified_base 14: mod_base = OTHER; note = 2'-O-methyladenosine-3'-phosphate
  modified_base 15: mod_base = OTHER; note = 2'-O-methylcytidine-3'-phosphate
  modified_base 16: mod_base = OTHER; note = 2'-O-methyladenosine-3'-phosphate
  modified_base 17: mod_base = OTHER; note = 2'-O-methyluridine-3'-phosphate
  modified_base 18: mod_base = OTHER; note = 2'-O-methylcytidine-3'-phosphate
  modified_base 19: mod_base = OTHER; note = 2'-O-methyluridine-3'-phosphate
  modified_base 20: mod_base = OTHER; note = 2'-O-methyladenosine-3'-phosphate
  modified_base 21: mod_base = OTHER; note 2'-O-methyluridine-3'-phosphate-N-[tris(GalNAc-alkyl)-amido decanoyl)]-4-hydroxyprolinol (Hyp-(GalNAc-alkyl)3)
gacaaattctactacatctat

SEQ ID NO: 156 - RNA, 21 nt, synthetic construct
  source 1..21: mol_type = other RNA
  modified_base 1: mod_base = OTHER; note = 2'-O-methylguanosine-3'-phosphorothioate
  modified_base 2: mod_base = OTHER; note = 2'-O-methyladenosine-3'-phosphorothioate
  modified_base 3: mod_base = OTHER; note = 2'-O-methylguanosine-3'-phosphate
  modified_base 4: mod_base = OTHER; note = 2'-O-methyladenosine-3'-phosphate
  modified_base 5: mod_base = OTHER; note = 2'-O-methyladenosine-3'-phosphate
  modified_base 6: mod_base = OTHER; note = 2'-O-methyladenosine-3'-phosphate
  modified_base 7: mod_base = OTHER; note = 2'-O-methyluridine-3'-phosphate
  modified_base 8: mod_base = OTHER; note = 2'-O-methyluridine-3'-phosphate
  modified_base 9: mod_base = OTHER; note = 2'-deoxy-2'-fluorocytidine-3'-phosphate
  modified_base 10: mod_base = OTHER; note = 2'-deoxy-2'-fluorouridine-3'-phosphate
  modified_base 11: mod_base = OTHER; note = 2'-deoxy-2'-fluoroadenosine-3'-phosphate
  modified_base 12: mod_base = OTHER; note = 2'-O-methylcytidine-3'-phosphate
  modified_base 13: mod_base = OTHER; note = 2'-O-methyluridine-3'-phosphate
  modified_base 14: mod_base = OTHER; note = 2'-O-methyladenosine-3'-phosphate
  modified_base 15: mod_base = OTHER; note = 2'-O-methylcytidine-3'-phosphate
  modified_base 16: mod_base = OTHER; note = 2'-O-methyladenosine-3'-phosphate
  modified_base 17: mod_base = OTHER; note = 2'-O-methyluridine-3'-phosphate
  modified_base 18: mod_base = OTHER; note = 2'-O-methylcytidine-3'-phosphate
  modified_base 19: mod_base = OTHER; note = 2'-O-methyluridine-3'-phosphate
  modified_base 20: mod_base = OTHER; note = 2'-O-methyladenosine-3'-phosphate
  modified_base 21: mod_base = OTHER; note 2'-O-methyluridine-3'-phosphate-N-[tris(GalNAc-alkyl)-amido decanoyl)]-4-hydroxyprolinol (Hyp-(GalNAc-alkyl)3)
gagaaattctactacatctat

SEQ ID NO: 157 - RNA, 21 nt, synthetic construct
  source 1..21: mol_type = other RNA
  modified_base 1: mod_base = OTHER; note = 2'-O-methylguanosine-3'-phosphorothioate
  modified_base 2: mod_base = OTHER; note = 2'-O-methyladenosine-3'-phosphorothioate
  modified_base 3: mod_base = OTHER; note = 2'-O-methylguanosine-3'-phosphate
  modified_base 4: mod_base = OTHER; note = 2'-O-methyladenosine-3'-phosphate
  modified_base 5: mod_base = OTHER; note = 2'-O-methyladenosine-3'-phosphate
  modified_base 6: mod_base = OTHER; note = 2'-O-methyladenosine-3'-phosphate
  modified_base 7: mod_base = OTHER; note = 2'-O-methyluridine-3'-phosphate
  modified_base 8: mod_base = OTHER; note = 2'-O-methyluridine-3'-phosphate
  modified_base 9: mod_base = OTHER; note = 2'-deoxy-2'-fluorocytidine-3'-phosphate
  modified_base 10: mod_base = OTHER; note = 2'-deoxy-2'-fluorouridine-3'-phosphate
  modified_base 11: mod_base = OTHER; note = 2'-deoxy-2'-fluoroadenosine-3'-phosphate
  modified_base 12: mod_base = OTHER; note = 2'-O-methylcytidine-3'-phosphate
  modified_base 13: mod_base = OTHER; note = 2'-O-methyluridine-3'-phosphate
  modified_base 14: mod_base = OTHER; note = 2'-O-methyladenosine-3'-phosphate
  modified_base 15: mod_base = OTHER; note = 2'-O-methylcytidine-3'-phosphate
  modified_base 16: mod_base = OTHER; note = 2'-O-methyladenosine-3'-phosphate
  modified_base 17: mod_base = OTHER; note = 2'-O-methyluridine-3'-phosphate
  modified_base 18: mod_base = OTHER; note = 2'-O-methylcytidine-3'-phosphate
  modified_base 19: mod_base = OTHER; note = 2'-O-methyluridine-3'-phosphate
  modified_base 20: mod_base = OTHER; note = 2'-O-methyladenosine-3'-phosphate
  modified_base 21: mod_base = OTHER; note 2'-O-methyluridine-3'-phosphate-N-[tris(GalNAc-alkyl)-amido decanoyl)]-4-hydroxyprolinol (Hyp-(GalNAc-alkyl)3)
gagaaattctactacatctat

SEQ ID NO: 158 - RNA, 21 nt, synthetic construct
  source 1..21: mol_type = other RNA
  modified_base 1: mod_base = OTHER; note = 2'-O-methyladenosine-3'-phosphorothioate
  modified_base 2: mod_base = OTHER; note = 2'-O-methylguanosine-3'-phosphorothioate
  modified_base 3: mod_base = OTHER; note = 2'-O-methyladenosine-3'-phosphate
  modified_base 4: mod_base = OTHER; note = 2'-O-methyladenosine-3'-phosphate
  modified_base 5: mod_base = OTHER; note = 2'-O-methyladenosine-3'-phosphate
  modified_base 6: mod_base = OTHER; note = 2'-O-methyluridine-3'-phosphate
  modified_base 7: mod_base = OTHER; note = 2'-O-methyluridine-3'-phosphate
  modified_base 8: mod_base = OTHER; note = 2'-O-methylcytidine-3'-phosphate
  modified_base 9: mod_base = OTHER; note = 2'-deoxy-2'-fluorouridine-3'-phosphate
  modified_base 10: mod_base = OTHER; note = 2'-deoxy-2'-fluoroadenosine-3'-phosphate
  modified_base 11: mod_base = OTHER; note = 2'-deoxy-2'-fluorocytidine-3'-phosphate
  modified_base 12: mod_base = OTHER; note = 2'-O-methyluridine-3'-phosphate
  modified_base 13: mod_base = OTHER; note = 2'-O-methyladenosine-3'-phosphate
  modified_base 14: mod_base = OTHER; note = 2'-O-methylcytidine-3'-phosphate
  modified_base 15: mod_base = OTHER; note = 2'-O-methyladenosine-3'-phosphate
  modified_base 16: mod_base = OTHER; note = 2'-O-methyluridine-3'-phosphate
  modified_base 17: mod_base = OTHER; note = 2'-O-methylcytidine-3'-phosphate
  modified_base 18: mod_base = OTHER; note = 2'-O-methyluridine-3'-phosphate
  modified_base 19: mod_base = OTHER; note = 2'-O-methyladenosine-3'-phosphate
  modified_base 20: mod_base = OTHER; note = 2'-O-methyluridine-3'-phosphate
  modified_base 21: mod_base = OTHER; note 2'-O-methyluridine-3'-phosphate-N-[tris(GalNAc-alkyl)-amido decanoyl)]-4-hydroxyprolinol (Hyp-(GalNAc-alkyl)3)
agaaattctactacatctatt

SEQ ID NO: 159 - RNA, 21 nt, synthetic construct
  source 1..21: mol_type = other RNA
  modified_base 1: mod_base = OTHER; note = 2'-O-methyladenosine-3'-phosphorothioate
  modified_base 2: mod_base = OTHER; note = 2'-O-methylguanosine-3'-phosphorothioate
  modified_base 3: mod_base = OTHER; note = 2'-O-methyladenosine-3'-phosphate
  modified_base 4: mod_base = OTHER; note = 2'-O-methyladenosine-3'-phosphate
  modified_base 5: mod_base = OTHER; note = 2'-O-methyladenosine-3'-phosphate
  modified_base 6: mod_base = OTHER; note = 2'-O-methyluridine-3'-phosphate
  modified_base 7: mod_base = OTHER; note = 2'-O-methyluridine-3'-phosphate
  modified_base 8: mod_base = OTHER; note = 2'-O-methylcytidine-3'-phosphate
  modified_base 9: mod_base = OTHER; note = 2'-deoxy-2'-fluorouridine-3'-phosphate
  modified_base 10: mod_base = OTHER; note = 2'-deoxy-2'-fluoroadenosine-3'-phosphate
  modified_base 11: mod_base = OTHER; note = 2'-deoxy-2'-fluorocytidine-3'-phosphate
  modified_base 12: mod_base = OTHER; note = 2'-O-methyluridine-3'-phosphate
  modified_base 13: mod_base = OTHER; note = 2'-O-methyladenosine-3'-phosphate
  modified_base 14: mod_base = OTHER; note = 2'-O-methylcytidine-3'-phosphate
  modified_base 15: mod_base = OTHER; note = 2'-O-methyladenosine-3'-phosphate
  modified_base 16: mod_base = OTHER; note = 2'-O-methyluridine-3'-phosphate
  modified_base 17: mod_base = OTHER; note = 2'-O-methylcytidine-3'-phosphate
  modified_base 18: mod_base = OTHER; note = 2'-O-methyluridine-3'-phosphate
  modified_base 19: mod_base = OTHER; note = 2'-O-methyladenosine-3'-phosphate
  modified_base 20: mod_base = OTHER; note = 2'-O-methyluridine-3'-phosphate
  modified_base 21: mod_base = OTHER; note 2'-O-methyluridine-3'-phosphate-N-[tris(GalNAc-alkyl)-amido decanoyl)]-4-hydroxyprolinol (Hyp-(GalNAc-alkyl)3)
agaaattctactacatctatt

SEQ ID NO: 160 - RNA, 21 nt, synthetic construct
  source 1..21: mol_type = other RNA
  modified_base 1: mod_base = OTHER; note = 2'-O-methyladenosine-3'-phosphorothioate
  modified_base 2: mod_base = OTHER; note = 2'-O-methylguanosine-3'-phosphorothioate
  modified_base 3: mod_base = OTHER; note = 2'-O-methyladenosine-3'-phosphate
  modified_base 4: mod_base = OTHER; note = 2'-O-methyladenosine-3'-phosphate
  modified_base 5: mod_base = OTHER; note = 2'-O-methyladenosine-3'-phosphate
  modified_base 6: mod_base = OTHER; note = 2'-O-methyluridine-3'-phosphate
  modified_base 7: mod_base = OTHER; note = 2'-O-methyluridine-3'-phosphate
  modified_base 8: mod_base = OTHER; note = 2'-O-methylcytidine-3'-phosphate
  modified_base 9: mod_base = OTHER; note = 2'-deoxy-2'-fluorouridine-3'-phosphate
  modified_base 10: mod_base = OTHER; note = 2'-deoxy-2'-fluoroadenosine-3'-phosphate
  modified_base 11: mod_base = OTHER; note = 2'-deoxy-2'-fluorocytidine-3'-phosphate
  modified_base 12: mod_base = OTHER; note = 2'-O-methyluridine-3'-phosphate
  modified_base 13: mod_base = OTHER; note = 2'-O-methyladenosine-3'-phosphate
  modified_base 14: mod_base = OTHER; note = 2'-O-methylcytidine-3'-phosphate
  modified_base 15: mod_base = OTHER; note = 2'-O-methyladenosine-3'-phosphate
  modified_base 16: mod_base = OTHER; note = 2'-O-methyluridine-3'-phosphate
  modified_base 17: mod_base = OTHER; note = 2'-O-methylcytidine-3'-phosphate
  modified_base 18: mod_base = OTHER; note = 2'-O-methyluridine-3'-phosphate
  modified_base 19: mod_base = OTHER; note = 2'-O-methyladenosine-3'-phosphate
  modified_base 20: mod_base = OTHER; note = 2'-O-methyluridine-3'-phosphate
  modified_base 21: mod_base = OTHER; note 2'-O-methyladenosine3'-phosphate-N-[tris(GalNAc-alkyl)-amid odecanoyl)]-4-hydroxyprolinol (Hyp-(GalNAc-alkyl)3)
agaaattctactacatctata

SEQ ID NO: 161 - RNA, 21 nt, synthetic construct
  source 1..21: mol_type = other RNA
  modified_base 1: mod_base = OTHER; note = 2'-O-methyladenosine-3'-phosphorothioate
  modified_base 2: mod_base = OTHER; note = 2'-O-methylguanosine-3'-phosphorothioate
  modified_base 3: mod_base = OTHER; note = 2'-O-methyladenosine-3'-phosphate
  modified_base 4: mod_base = OTHER; note = 2'-O-methyladenosine-3'-phosphate
  modified_base 5: mod_base = OTHER; note = 2'-O-methyladenosine-3'-phosphate
  modified_base 6: mod_base = OTHER; note = 2'-O-methyluridine-3'-phosphate
  modified_base 7: mod_base = OTHER; note = 2'-O-methyluridine-3'-phosphate
  modified_base 8: mod_base = OTHER; note = 2'-O-methylcytidine-3'-phosphate
  modified_base 9: mod_base = OTHER; note = 2'-deoxy-2'-fluorouridine-3'-phosphate
  modified_base 10: mod_base = OTHER; note = 2'-deoxy-2'-fluoroadenosine-3'-phosphate
  modified_base 11: mod_base = OTHER; note = 2'-deoxy-2'-fluorocytidine-3'-phosphate
  modified_base 12: mod_base = OTHER; note = 2'-O-methyluridine-3'-phosphate
  modified_base 13: mod_base = OTHER; note = 2'-O-methyladenosine-3'-phosphate
  modified_base 14: mod_base = OTHER; note = 2'-O-methylcytidine-3'-phosphate
  modified_base 15: mod_base = OTHER; note = 2'-O-methyladenosine-3'-phosphate
  modified_base 16: mod_base = OTHER; note = 2'-O-methyluridine-3'-phosphate
  modified_base 17: mod_base = OTHER; note = 2'-O-methylcytidine-3'-phosphate
  modified_base 18: mod_base = OTHER; note = 2'-O-methyluridine-3'-phosphate
  modified_base 19: mod_base = OTHER; note = 2'-O-methyladenosine-3'-phosphate
  modified_base 20: mod_base = OTHER; note = 2'-O-methyluridine-3'-phosphate
  modified_base 21: mod_base = OTHER; note 2'-O-methyladenosine3'-phosphate-N-[tris(GalNAc-alkyl)-amid odecanoyl)]-4-hydroxyprolinol (Hyp-(GalNAc-alkyl)3)
agaaattctactacatctata

SEQ ID NO: 162 - RNA, 21 nt, synthetic construct
  source 1..21: mol_type = other RNA
  modified_base 1: mod_base = OTHER; note = 2'-O-methyladenosine-3'-phosphorothioate
  modified_base 2: mod_base = OTHER; note = 2'-O-methylguanosine-3'-phosphorothioate
  modified_base 3: mod_base = OTHER; note = 2'-O-methyladenosine-3'-phosphate
  modified_base 4: mod_base = OTHER; note = 2'-O-methyladenosine-3'-phosphate
  modified_base 5: mod_base = OTHER; note = 2'-O-methyladenosine-3'-phosphate
  modified_base 6: mod_base = OTHER; note = 2'-O-methyluridine-3'-phosphate
  modified_base 7: mod_base = OTHER; note = 2'-O-methyluridine-3'-phosphate
  modified_base 8: mod_base = OTHER; note = 2'-O-methylcytidine-3'-phosphate
  modified_base 9: mod_base = OTHER; note = 2'-deoxy-2'-fluorouridine-3'-phosphate
  modified_base 10: mod_base = OTHER; note = 2'-deoxy-2'-fluoroadenosine-3'-phosphate
  modified_base 11: mod_base = OTHER; note = 2'-deoxy-2'-fluorocytidine-3'-phosphate
  modified_base 12: mod_base = OTHER; note = 2'-O-methyluridine-3'-phosphate
  modified_base 13: mod_base = OTHER; note = 2'-O-methyladenosine-3'-phosphate
  modified_base 14: mod_base = OTHER; note = 2'-O-methylcytidine-3'-phosphate
  modified_base 15: mod_base = OTHER; note = 2'-O-methyladenosine-3'-phosphate
  modified_base 16: mod_base = OTHER; note = 2'-O-methyluridine-3'-phosphate
  modified_base 17: mod_base = OTHER; note = 2'-O-methylcytidine-3'-phosphate
  modified_base 18: mod_base = OTHER; note = 2'-O-methyluridine-3'-phosphate
  modified_base 19: mod_base = OTHER; note = 2'-O-methyladenosine-3'-phosphate
  modified_base 20: mod_base = OTHER; note = 2'-O-methyluridine-3'-phosphate
  modified_base 21: mod_base = OTHER; note 2'-O-methyluridine-3'-phosphate-N-[tris(GalNAc-alkyl)-amido decanoyl)]-4-hydroxyprolinol (Hyp-(GalNAc-alkyl)3)
agaaattctactacatctatt

SEQ ID NO: 163 - RNA, 21 nt, synthetic construct
  source 1..21: mol_type = other RNA
  modified_base 1: mod_base = OTHER; note = 2'-O-methyladenosine-3'-phosphorothioate
  modified_base 2: mod_base = OTHER; note = 2'-O-methylguanosine-3'-phosphorothioate
  modified_base 3: mod_base = OTHER; note = 2'-O-methyladenosine-3'-phosphate
  modified_base 4: mod_base = OTHER; note = 2'-O-methyladenosine-3'-phosphate
  modified_base 5: mod_base = OTHER; note = 2'-O-methyladenosine-3'-phosphate
  modified_base 6: mod_base = OTHER; note = 2'-O-methyluridine-3'-phosphate
  modified_base 7: mod_base = OTHER; note = 2'-O-methyluridine-3'-phosphate
  modified_base 8: mod_base = OTHER; note = 2'-O-methylcytidine-3'-phosphate
  modified_base 9: mod_base = OTHER; note = 2'-deoxy-2'-fluorouridine-3'-phosphate
  modified_base 10: mod_base = OTHER; note = 2'-deoxy-2'-fluoroadenosine-3'-phosphate
  modified_base 11: mod_base = OTHER; note = 2'-deoxy-2'-fluorocytidine-3'-phosphate
  modified_base 12: mod_base = OTHER; note = 2'-O-methyluridine-3'-phosphate
  modified_base 13: mod_base = OTHER; note = 2'-O-methyladenosine-3'-phosphate
  modified_base 14: mod_base = OTHER; note = 2'-O-methylcytidine-3'-phosphate
  modified_base 15: mod_base = OTHER; note = 2'-O-methyladenosine-3'-phosphate
  modified_base 16: mod_base = OTHER; note = 2'-O-methyluridine-3'-phosphate
  modified_base 17: mod_base = OTHER; note = 2'-O-methylcytidine-3'-phosphate
  modified_base 18: mod_base = OTHER; note = 2'-O-methyluridine-3'-phosphate
  modified_base 19: mod_base = OTHER; note = 2'-O-methyladenosine-3'-phosphate
  modified_base 20: mod_base = OTHER; note = 2'-O-methyluridine-3'-phosphate
  modified_base 21: mod_base = OTHER; note 2'-O-methyluridine-3'-phosphate-N-[tris(GalNAc-alkyl)-amido decanoyl)]-4-hydroxyprolinol (Hyp-(GalNAc-alkyl)3)
agaaattctactacatctatt

SEQ ID NO: 164 - RNA, 19 nt, synthetic construct
  source 1..19: mol_type = other RNA
  modified_base 1: mod_base = OTHER; note = 2'-O-methyladenosine-3'-phosphorothioate
  modified_base 2: mod_base = OTHER; note = 2'-O-methyladenosine-3'-phosphorothioate
  modified_base 3: mod_base = OTHER; note = 2'-O-methyladenosine-3'-phosphate
  modified_base 4: mod_base = OTHER; note = 2'-O-methyluridine-3'-phosphate
  modified_base 5: mod_base = OTHER; note = 2'-O-methyluridine-3'-phosphate
  modified_base 6: mod_base = OTHER; note = 2'-O-methylcytidine-3'-phosphate
  modified_base 7: mod_base = OTHER; note = 2'-deoxy-2'-fluorouridine-3'-phosphate
  modified_base 8: mod_base = OTHER; note = 2'-deoxy-2'-fluoroadenosine-3'-phosphate
  modified_base 9: mod_base = OTHER; note = 2'-deoxy-2'-fluorocytidine-3'-phosphate
  modified_base 10: mod_base = OTHER; note = 2'-O-methyluridine-3'-phosphate
  modified_base 11: mod_base = OTHER; note = 2'-O-methyladenosine-3'-phosphate
  modified_base 12: mod_base = OTHER; note = 2'-O-methylcytidine-3'-phosphate
  modified_base 13: mod_base = OTHER; note = 2'-O-methyladenosine-3'-phosphate
  modified_base 14: mod_base = OTHER; note = 2'-O-methyluridine-3'-phosphate
  modified_base 15: mod_base = OTHER; note = 2'-O-methylcytidine-3'-phosphate
  modified_base 16: mod_base = OTHER; note = 2'-O-methyluridine-3'-phosphate
  modified_base 17: mod_base = OTHER; note = 2'-O-methyladenosine-3'-phosphate
  modified_base 18: mod_base = OTHER; note = 2'-O-methyluridine-3'-phosphate
  modified_base 19: mod_base = OTHER; note 2'-O-methyluridine-3'-phosphate-N-[tris(GalNAc-alkyl)-amido decanoyl)]-4-hydroxyprolinol (Hyp-(GalNAc-alkyl)3)
aaattctactacatctatt

SEQ ID NO: 165 - RNA, 19 nt, synthetic construct
  source 1..19: mol_type = other RNA
  modified_base 1: mod_base = OTHER; note = 2'-O-methyladenosine-3'-phosphorothioate
  modified_base 2: mod_base = OTHER; note = 2'-O-methyladenosine-3'-phosphorothioate
  modified_base 3: mod_base = OTHER; note = 2'-O-methyladenosine-3'-phosphate
  modified_base 4: mod_base = OTHER; note = 2'-O-methyluridine-3'-phosphate
  modified_base 5: mod_base = OTHER; note = 2'-O-methyluridine-3'-phosphate
  modified_base 6: mod_base = OTHER; note = 2'-O-methylcytidine-3'-phosphate
  modified_base 7: mod_base = OTHER; note = 2'-deoxy-2'-fluorouridine-3'-phosphate
  modified_base 8: mod_base = OTHER; note = 2'-deoxy-2'-fluoroadenosine-3'-phosphate
  modified_base 9: mod_base = OTHER; note = 2'-deoxy-2'-fluorocytidine-3'-phosphate
  modified_base 10: mod_base = OTHER; note = 2'-O-methyluridine-3'-phosphate
  modified_base 11: mod_base = OTHER; note = 2'-O-methyladenosine-3'-phosphate
  modified_base 12: mod_base = OTHER; note = 2'-O-methylcytidine-3'-phosphate
  modified_base 13: mod_base = OTHER; note = 2'-O-methyladenosine-3'-phosphate
  modified_base 14: mod_base = OTHER; note = 2'-O-methyluridine-3'-phosphate
  modified_base 15: mod_base = OTHER; note = 2'-O-methylcytidine-3'-phosphate
  modified_base 16: mod_base = OTHER; note = 2'-O-methyluridine-3'-phosphate
  modified_base 17: mod_base = OTHER; note = 2'-O-methyladenosine-3'-phosphate
  modified_base 18: mod_base = OTHER; note = 2'-O-methyluridine-3'-phosphate
  modified_base 19: mod_base = OTHER; note 2'-O-methyluridine-3'-phosphate-N-[tris(GalNAc-alkyl)-amido decanoyl)]-4-hydroxyprolinol (Hyp-(GalNAc-alkyl)3)
aaattctactacatctatt

SEQ ID NO: 166 - RNA, 21 nt, synthetic construct
  source 1..21: mol_type = other RNA
  modified_base 1: mod_base = OTHER; note = 2'-O-methyladenosine-3'-phosphorothioate
  modified_base 2: mod_base = OTHER; note = 2'-O-methylguanosine-3'-phosphorothioate
  modified_base 3: mod_base = OTHER; note = 2'-O-methyladenosine-3'-phosphate
  modified_base 4: mod_base = OTHER; note = 2'-O-methyladenosine-3'-phosphate
  modified_base 5: mod_base = OTHER; note = 2'-O-methyluridine-3'-phosphate
  modified_base 6: mod_base = OTHER; note = 2'-O-methyluridine-3'-phosphate
  modified_base 7: mod_base = OTHER; note = 2'-O-methyluridine-3'-phosphate
  modified_base 8: mod_base = OTHER; note = 2'-O-methylcytidine-3'-phosphate
  modified_base 9: mod_base = OTHER; note = 2'-deoxy-2'-fluorouridine-3'-phosphate
  modified_base 10: mod_base = OTHER; note = 2'-deoxy-2'-fluoroadenosine-3'-phosphate
  modified_base 11: mod_base = OTHER; note = 2'-deoxy-2'-fluorocytidine-3'-phosphate
  modified_base 12: mod_base = OTHER; note = 2'-O-methyluridine-3'-phosphate
  modified_base 13: mod_base = OTHER; note = 2'-O-methyladenosine-3'-phosphate
  modified_base 14: mod_base = OTHER; note = 2'-O-methylcytidine-3'-phosphate
  modified_base 15: mod_base = OTHER; note = 2'-O-methyladenosine-3'-phosphate
  modified_base 16: mod_base = OTHER; note = 2'-O-methyluridine-3'-phosphate
  modified_base 17: mod_base = OTHER; note = 2'-O-methylcytidine-3'-phosphate
  modified_base 18: mod_base = OTHER; note = 2'-O-methyluridine-3'-phosphate
  modified_base 19: mod_base = OTHER; note = 2'-O-methyladenosine-3'-phosphate
  modified_base 20: mod_base = OTHER; note = 2'-O-methyluridine-3'-phosphate
  modified_base 21: mod_base = OTHER; note 2'-O-methyluridine-3'-phosphate-N-[tris(GalNAc-alkyl)-amido decanoyl)]-4-hydroxyprolinol (Hyp-(GalNAc-alkyl)3)
agaatttctactacatctatt

SEQ ID NO: 167 - RNA, 21 nt, synthetic construct
  source 1..21: mol_type = other RNA
  modified_base 1: mod_base = OTHER; note = 2'-O-methyladenosine-3'-phosphorothioate
  modified_base 2: mod_base = OTHER; note = 2'-O-methylguanosine-3'-phosphorothioate
  modified_base 3: mod_base = OTHER; note = 2'-O-methyladenosine-3'-phosphate
  modified_base 4: mod_base = OTHER; note = 2'-O-methyluridine-3'-phosphate
  modified_base 5: mod_base = OTHER; note = 2'-O-methyladenosine-3'-phosphate
  modified_base 6: mod_base = OTHER; note = 2'-O-methyluridine-3'-phosphate
  modified_base 7: mod_base = OTHER; note = 2'-O-methyluridine-3'-phosphate
  modified_base 8: mod_base = OTHER; note = 2'-O-methylcytidine-3'-phosphate
  modified_base 9: mod_base = OTHER; note = 2'-deoxy-2'-fluorouridine-3'-phosphate
  modified_base 10: mod_base = OTHER; note = 2'-deoxy-2'-fluoroadenosine-3'-phosphate
  modified_base 11: mod_base = OTHER; note = 2'-deoxy-2'-fluorocytidine-3'-phosphate
  modified_base 12: mod_base = OTHER; note = 2'-O-methyluridine-3'-phosphate
  modified_base 13: mod_base = OTHER; note = 2'-O-methyladenosine-3'-phosphate
  modified_base 14: mod_base = OTHER; note = 2'-O-methylcytidine-3'-phosphate
  modified_base 15: mod_base = OTHER; note = 2'-O-methyladenosine-3'-phosphate
  modified_base 16: mod_base = OTHER; note = 2'-O-methyluridine-3'-phosphate
  modified_base 17: mod_base = OTHER; note = 2'-O-methylcytidine-3'-phosphate
  modified_base 18: mod_base = OTHER; note = 2'-O-methyluridine-3'-phosphate
  modified_base 19: mod_base = OTHER; note = 2'-O-methyladenosine-3'-phosphate
  modified_base 20: mod_base = OTHER; note = 2'-O-methyluridine-3'-phosphate
  modified_base 21: mod_base = OTHER; note 2'-O-methyluridine-3'-phosphate-N-[tris(GalNAc-alkyl)-amido decanoyl)]-4-hydroxyprolinol (Hyp-(GalNAc-alkyl)3)
agatattctactacatctatt

SEQ ID NO: 168 - RNA, 21 nt, synthetic construct
  source 1..21: mol_type = other RNA
  modified_base 1: mod_base = OTHER; note = 2'-O-methyladenosine-3'-phosphorothioate
  modified_base 2: mod_base = OTHER; note = 2'-O-methylguanosine-3'-phosphorothioate
  modified_base 3: mod_base = OTHER; note = 2'-O-methyluridine-3'-phosphate
  modified_base 4: mod_base = OTHER; note = 2'-O-methyladenosine-3'-phosphate
  modified_base 5: mod_base = OTHER; note = 2'-O-methyladenosine-3'-phosphate
  modified_base 6: mod_base = OTHER; note = 2'-O-methyluridine-3'-phosphate
  modified_base 7: mod_base = OTHER; note = 2'-O-methyluridine-3'-phosphate
  modified_base 8: mod_base = OTHER; note = 2'-O-methylcytidine-3'-phosphate
  modified_base 9: mod_base = OTHER; note = 2'-deoxy-2'-fluorouridine-3'-phosphate
  modified_base 10: mod_base = OTHER; note = 2'-deoxy-2'-fluoroadenosine-3'-phosphate
  modified_base 11: mod_base = OTHER; note = 2'-deoxy-2'-fluorocytidine-3'-phosphate
  modified_base 12: mod_base = OTHER; note = 2'-O-methyluridine-3'-phosphate
  modified_base 13: mod_base = OTHER; note = 2'-O-methyladenosine-3'-phosphate
  modified_base 14: mod_base = OTHER; note = 2'-O-methylcytidine-3'-phosphate
  modified_base 15: mod_base = OTHER; note = 2'-O-methyladenosine-3'-phosphate
  modified_base 16: mod_base = OTHER; note = 2'-O-methyluridine-3'-phosphate
  modified_base 17: mod_base = OTHER; note = 2'-O-methylcytidine-3'-phosphate
  modified_base 18: mod_base = OTHER; note = 2'-O-methyluridine-3'-phosphate
  modified_base 19: mod_base = OTHER; note = 2'-O-methyladenosine-3'-phosphate
  modified_base 20: mod_base = OTHER; note = 2'-O-methyluridine-3'-phosphate
  modified_base 21: mod_base = OTHER; note 2'-O-methyluridine-3'-phosphate-N-[tris(GalNAc-alkyl)-amido decanoyl)]-4-hydroxyprolinol (Hyp-(GalNAc-alkyl)3)
agtaattctactacatctatt

SEQ ID NO: 169 - RNA, 21 nt, synthetic construct
  source 1..21: mol_type = other RNA
  modified_base 1: mod_base = OTHER; note = 2'-O-methyladenosine-3'-phosphorothioate
  modified_base 2: mod_base = OTHER; note = 2'-O-methylguanosine-3'-phosphorothioate
  modified_base 3: mod_base = OTHER; note = 2'-O-methyladenosine-3'-phosphate
  modified_base 4: mod_base = OTHER; note = 2'-O-methyladenosine-3'-phosphate
  modified_base 5: mod_base = OTHER; note = 2'-O-methyluridine-3'-phosphate
  modified_base 6: mod_base = OTHER; note = 2'-O-methyluridine-3'-phosphate
  modified_base 7: mod_base = OTHER; note = 2'-O-methyluridine-3'-phosphate
  modified_base 8: mod_base = OTHER; note = 2'-O-methylcytidine-3'-phosphate
  modified_base 9: mod_base = OTHER; note = 2'-deoxy-2'-fluorouridine-3'-phosphate
  modified_base 10: mod_base = OTHER; note = 2'-deoxy-2'-fluoroadenosine-3'-phosphate
  modified_base 11: mod_base = OTHER; note = 2'-deoxy-2'-fluorocytidine-3'-phosphate
  modified_base 12: mod_base = OTHER; note = 2'-O-methyluridine-3'-phosphate
  modified_base 13: mod_base = OTHER; note = 2'-O-methyladenosine-3'-phosphate
  modified_base 14: mod_base = OTHER; note = 2'-O-methylcytidine-3'-phosphate
  modified_base 15: mod_base = OTHER; note = 2'-O-methyladenosine-3'-phosphate
  modified_base 16: mod_base = OTHER; note = 2'-O-methyluridine-3'-phosphate
  modified_base 17: mod_base = OTHER; note = 2'-O-methylcytidine-3'-phosphate
  modified_base 18: mod_base = OTHER; note = 2'-O-methyluridine-3'-phosphate
  modified_base 19: mod_base = OTHER; note = 2'-O-methyladenosine-3'-phosphate
  modified_base 20: mod_base = OTHER; note = 2'-O-methyluridine-3'-phosphate
  modified_base 21: mod_base = OTHER; note 2'-O-methyluridine-3'-phosphate-N-[tris(GalNAc-alkyl)-amido decanoyl)]-4-hydroxyprolinol (Hyp-(GalNAc-alkyl)3)
agaatttctactacatctatt

SEQ ID NO: 170 - RNA, 21 nt, synthetic construct
  source 1..21: mol_type = other RNA
  modified_base 1: mod_base = OTHER; note = 2'-O-methyladenosine-3'-phosphorothioate
  modified_base 2: mod_base = OTHER; note = 2'-O-methylguanosine-3'-phosphorothioate
  modified_base 3: mod_base = OTHER; note = 2'-O-methyladenosine-3'-phosphate
  modified_base 4: mod_base = OTHER; note = 2'-O-methyluridine-3'-phosphate
  modified_base 5: mod_base = OTHER; note = 2'-O-methyladenosine-3'-phosphate
  modified_base 6: mod_base = OTHER; note = 2'-O-methyluridine-3'-phosphate
  modified_base 7: mod_base = OTHER; note = 2'-O-methyluridine-3'-phosphate
  modified_base 8: mod_base = OTHER; note = 2'-O-methylcytidine-3'-phosphate
  modified_base 9: mod_base = OTHER; note = 2'-deoxy-2'-fluorouridine-3'-phosphate
  modified_base 10: mod_base = OTHER; note = 2'-deoxy-2'-fluoroadenosine-3'-phosphate
  modified_base 11: mod_base = OTHER; note = 2'-deoxy-2'-fluorocytidine-3'-phosphate
  modified_base 12: mod_base = OTHER; note = 2'-O-methyluridine-3'-phosphate
  modified_base 13: mod_base = OTHER; note = 2'-O-methyladenosine-3'-phosphate
  modified_base 14: mod_base = OTHER; note = 2'-O-methylcytidine-3'-phosphate
  modified_base 15: mod_base = OTHER; note = 2'-O-methyladenosine-3'-phosphate
  modified_base 16: mod_base = OTHER; note = 2'-O-methyluridine-3'-phosphate
  modified_base 17: mod_base = OTHER; note = 2'-O-methylcytidine-3'-phosphate
  modified_base 18: mod_base = OTHER; note = 2'-O-methyluridine-3'-phosphate
  modified_base 19: mod_base = OTHER; note = 2'-O-methyladenosine-3'-phosphate
  modified_base 20: mod_base = OTHER; note = 2'-O-methyluridine-3'-phosphate
  modified_base 21: mod_base = OTHER; note 2'-O-methyluridine-3'-phosphate-N-[tris(GalNAc-alkyl)-amido decanoyl)]-4-hydroxyprolinol (Hyp-(GalNAc-alkyl)3)
agatattctactacatctatt

SEQ ID NO: 171 - RNA, 21 nt, synthetic construct
  source 1..21: mol_type = other RNA
  modified_base 1: mod_base = OTHER; note = 2'-O-methyladenosine-3'-phosphorothioate
  modified_base 2: mod_base = OTHER; note = 2'-O-methylguanosine-3'-phosphorothioate
  modified_base 3: mod_base = OTHER; note = 2'-O-methyluridine-3'-phosphate
  modified_base 4: mod_base = OTHER; note = 2'-O-methyladenosine-3'-phosphate
  modified_base 5: mod_base = OTHER; note = 2'-O-methyladenosine-3'-phosphate
  modified_base 6: mod_base = OTHER; note = 2'-O-methyluridine-3'-phosphate
  modified_base 7: mod_base = OTHER; note = 2'-O-methyluridine-3'-phosphate
  modified_base 8: mod_base = OTHER; note = 2'-O-methylcytidine-3'-phosphate
  modified_base 9: mod_base = OTHER; note = 2'-deoxy-2'-fluorouridine-3'-phosphate
  modified_base 10: mod_base = OTHER; note = 2'-deoxy-2'-fluoroadenosine-3'-phosphate
  modified_base 11: mod_base = OTHER; note = 2'-deoxy-2'-fluorocytidine-3'-phosphate
  modified_base 12: mod_base = OTHER; note = 2'-O-methyluridine-3'-phosphate
  modified_base 13: mod_base = OTHER; note = 2'-O-methyladenosine-3'-phosphate
  modified_base 14: mod_base = OTHER; note = 2'-O-methylcytidine-3'-phosphate
  modified_base 15: mod_base = OTHER; note = 2'-O-methyladenosine-3'-phosphate
  modified_base 16: mod_base = OTHER; note = 2'-O-methyluridine-3'-phosphate
  modified_base 17: mod_base = OTHER; note = 2'-O-methylcytidine-3'-phosphate
  modified_base 18: mod_base = OTHER; note = 2'-O-methyluridine-3'-phosphate
  modified_base 19: mod_base = OTHER; note = 2'-O-methyladenosine-3'-phosphate
  modified_base 20: mod_base = OTHER; note = 2'-O-methyluridine-3'-phosphate
  modified_base 21: mod_base = OTHER; note 2'-O-methyluridine-3'-phosphate-N-[tris(GalNAc-alkyl)-amido decanoyl)]-4-hydroxyprolinol (Hyp-(GalNAc-alkyl)3)
agtaattctactacatctatt

SEQ ID NO: 172 - RNA, 19 nt, synthetic construct
  source 1..19: mol_type = other RNA
  modified_base 1: mod_base = OTHER; note = 2'-O-methyladenosine-3'-phosphorothioate
  modified_base 2: mod_base = OTHER; note = 2'-O-methyladenosine-3'-phosphorothioate
  modified_base 3: mod_base = OTHER; note = 2'-O-methyluridine-3'-phosphate
  modified_base 4: mod_base = OTHER; note = 2'-O-methyluridine-3'-phosphate
  modified_base 5: mod_base = OTHER; note = 2'-O-methyluridine-3'-phosphate
  modified_base 6: mod_base = OTHER; note = 2'-O-methylcytidine-3'-phosphate
  modified_base 7: mod_base = OTHER; note = 2'-deoxy-2'-fluorouridine-3'-phosphate
  modified_base 8: mod_base = OTHER; note = 2'-deoxy-2'-fluoroadenosine-3'-phosphate
  modified_base 9: mod_base = OTHER; note = 2'-deoxy-2'-fluorocytidine-3'-phosphate
  modified_base 10: mod_base = OTHER; note = 2'-O-methyluridine-3'-phosphate
  modified_base 11: mod_base = OTHER; note = 2'-O-methyladenosine-3'-phosphate
  modified_base 12: mod_base = OTHER; note = 2'-O-methylcytidine-3'-phosphate
  modified_base 13: mod_base = OTHER; note = 2'-O-methyladenosine-3'-phosphate
  modified_base 14: mod_base = OTHER; note = 2'-O-methyluridine-3'-phosphate
  modified_base 15: mod_base = OTHER; note = 2'-O-methylcytidine-3'-phosphate
  modified_base 16: mod_base = OTHER; note = 2'-O-methyluridine-3'-phosphate
  modified_base 17: mod_base = OTHER; note = 2'-O-methyladenosine-3'-phosphate
  modified_base 18: mod_base = OTHER; note = 2'-O-methyluridine-3'-phosphate
  modified_base 19: mod_base = OTHER; note 2'-O-methyluridine-3'-phosphate-N-[tris(GalNAc-alkyl)-amido decanoyl)]-4-hydroxyprolinol (Hyp-(GalNAc-alkyl)3)
aatttctactacatctatt

SEQ ID NO: 173 - RNA, 19 nt, synthetic construct
  source 1..19: mol_type = other RNA
  modified_base 1: mod_base = OTHER; note = 2'-O-methyladenosine-3'-phosphorothioate
  modified_base 2: mod_base = OTHER; note = 2'-O-methyluridine-3'-phosphorothioate
  modified_base 3: mod_base = OTHER; note = 2'-O-methyladenosine-3'-phosphate
  modified_base 4: mod_base = OTHER; note = 2'-O-methyluridine-3'-phosphate
  modified_base 5: mod_base = OTHER; note = 2'-O-methyluridine-3'-phosphate
  modified_base 6: mod_base = OTHER; note = 2'-O-methylcytidine-3'-phosphate
  modified_base 7: mod_base = OTHER; note = 2'-deoxy-2'-fluorouridine-3'-phosphate
  modified_base 8: mod_base = OTHER; note = 2'-deoxy-2'-fluoroadenosine-3'-phosphate
  modified_base 9: mod_base = OTHER; note = 2'-deoxy-2'-fluorocytidine-3'-phosphate
  modified_base 10: mod_base = OTHER; note = 2'-O-methyluridine-3'-phosphate
  modified_base 11: mod_base = OTHER; note = 2'-O-methyladenosine-3'-phosphate
  modified_base 12: mod_base = OTHER; note = 2'-O-methylcytidine-3'-phosphate
  modified_base 13: mod_base = OTHER; note = 2'-O-methyladenosine-3'-phosphate
  modified_base 14: mod_base = OTHER; note = 2'-O-methyluridine-3'-phosphate
  modified_base 15: mod_base = OTHER; note = 2'-O-methylcytidine-3'-phosphate
  modified_base 16: mod_base = OTHER; note = 2'-O-methyluridine-3'-phosphate
  modified_base 17: mod_base = OTHER; note = 2'-O-methyladenosine-3'-phosphate
  modified_base 18: mod_base = OTHER; note = 2'-O-methyluridine-3'-phosphate
  modified_base 19: mod_base = OTHER; note 2'-O-methyluridine-3'-phosphate-N-[tris(GalNAc-alkyl)-amido decanoyl)]-4-hydroxyprolinol (Hyp-(GalNAc-alkyl)3)
atattctactacatctatt

SEQ ID NO: 174 - RNA, 19 nt, synthetic construct
  source 1..19: mol_type = other RNA
  modified_base 1: mod_base = OTHER; note = 2'-O-methyluridine-3'-phosphorothioate
  modified_base 2: mod_base = OTHER; note = 2'-O-methyladenosine-3'-phosphorothioate
  modified_base 3: mod_base = OTHER; note = 2'-O-methyladenosine-3'-phosphate
  modified_base 4: mod_base = OTHER; note = 2'-O-methyluridine-3'-phosphate
  modified_base 5: mod_base = OTHER; note = 2'-O-methyluridine-3'-phosphate
  modified_base 6: mod_base = OTHER; note = 2'-O-methylcytidine-3'-phosphate
  modified_base 7: mod_base = OTHER; note = 2'-deoxy-2'-fluorouridine-3'-phosphate
  modified_base 8: mod_base = OTHER; note = 2'-deoxy-2'-fluoroadenosine-3'-phosphate
  modified_base 9: mod_base = OTHER; note = 2'-deoxy-2'-fluorocytidine-3'-phosphate
  modified_base 10: mod_base = OTHER; note = 2'-O-methyluridine-3'-phosphate
  modified_base 11: mod_base = OTHER; note = 2'-O-methyladenosine-3'-phosphate
  modified_base 12: mod_base = OTHER; note = 2'-O-methylcytidine-3'-phosphate
  modified_base 13: mod_base = OTHER; note = 2'-O-methyladenosine-3'-phosphate
  modified_base 14: mod_base = OTHER; note = 2'-O-methyluridine-3'-phosphate
  modified_base 15: mod_base = OTHER; note = 2'-O-methylcytidine-3'-phosphate
  modified_base 16: mod_base = OTHER; note = 2'-O-methyluridine-3'-phosphate
  modified_base 17: mod_base = OTHER; note = 2'-O-methyladenosine-3'-phosphate
  modified_base 18: mod_base = OTHER; note = 2'-O-methyluridine-3'-phosphate
  modified_base 19: mod_base = OTHER; note 2'-O-methyluridine-3'-phosphate-N-[tris(GalNAc-alkyl)-amido decanoyl)]-4-hydroxyprolinol (Hyp-(GalNAc-alkyl)3)
taattctactacatctatt

SEQ ID NO: 175 - RNA, 21 nt, synthetic construct
  source 1..21: mol_type = other RNA
  modified_base 1: mod_base = OTHER; note = 2'-O-methyladenosine-3'-phosphorothioate
  modified_base 2: mod_base = OTHER; note = 2'-O-methylguanosine-3'-phosphorothioate
  modified_base 3: mod_base = OTHER; note = 2'-O-methyladenosine-3'-phosphate
  modified_base 4: mod_base = OTHER; note = 2'-O-methyladenosine-3'-phosphate
  modified_base 5: mod_base = OTHER; note = 2'-O-methyladenosine-3'-phosphate
  modified_base 6: mod_base = OTHER; note = 2'-O-methyluridine-3'-phosphate
  modified_base 7: mod_base = OTHER; note = 2'-O-methyluridine-3'-phosphate
  modified_base 8: mod_base = OTHER; note = 2'-O-methylcytidine-3'-phosphate
  modified_base 9: mod_base = OTHER; note = 2'-deoxy-2'-fluorouridine-3'-phosphate
  modified_base 10: mod_base = OTHER; note = 2'-deoxy-2'-fluoroadenosine-3'-phosphate
  modified_base 11: mod_base = OTHER; note = 2'-deoxy-2'-fluorocytidine-3'-phosphate
  modified_base 12: mod_base = OTHER; note = 2'-O-methyluridine-3'-phosphate
  modified_base 13: mod_base = OTHER; note = 2'-O-methyladenosine-3'-phosphate
  modified_base 14: mod_base = OTHER; note = 2'-O-methylcytidine-3'-phosphate
  modified_base 15: mod_base = OTHER; note = 2'-O-methyladenosine-3'-phosphate
  modified_base 16: mod_base = OTHER; note = 2'-O-methyluridine-3'-phosphate
  modified_base 17: mod_base = OTHER; note = 2'-O-methylcytidine-3'-phosphate
  modified_base 18: mod_base = OTHER; note = 2'-O-methyluridine-3'-phosphate
  modified_base 19: mod_base = OTHER; note = 2'-O-methyladenosine-3'-phosphate
  modified_base 20: mod_base = OTHER; note = 2'-O-methyluridine-3'-phosphate
  modified_base 21: mod_base = OTHER; note 2'-O-methyluridine-3'-phosphate-N-[tris(GalNAc-alkyl)-amido decanoyl)]-4-hydroxyprolinol (Hyp-(GalNAc-alkyl)3)
agaaattctactacatctatt

SEQ ID NO: 176 - RNA, 21 nt, synthetic construct
  source 1..21: mol_type = other RNA
  modified_base 1: mod_base = OTHER; note = 2'-O-methylguanosine-3'-phosphorothioate
  modified_base 2: mod_base = OTHER; note = 2'-O-methyladenosine-3'-phosphorothioate
  modified_base 3: mod_base = OTHER; note = 2'-O-methylguanosine-3'-phosphate
  modified_base 4: mod_base = OTHER; note = 2'-O-methyladenosine-3'-phosphate
  modified_base 5: mod_base = OTHER; note = 2'-O-methyladenosine-3'-phosphate
  modified_base 6: mod_base = OTHER; note = 2'-O-methyladenosine-3'-phosphate
  modified_base 7: mod_base = OTHER; note = 2'-deoxy-2'-fluorouridine-3'-phosphate
  modified_base 8: mod_base = OTHER; note = 2'-O-methyluridine-3'-phosphate
  modified_base 9: mod_base = OTHER; note = 2'-deoxy-2'-fluorocytidine-3'-phosphate
  modified_base 10: mod_base = OTHER; note = 2'-deoxy-2'-fluorouridine-3'-phosphate
  modified_base 11: mod_base = OTHER; note = 2'-deoxy-2'-fluoroadenosine-3'-phosphate
  modified_base 12: mod_base = OTHER; note = 2'-O-methylcytidine-3'-phosphate
  modified_base 13: mod_base = OTHER; note = 2'-O-methyluridine-3'-phosphate
  modified_base 14: mod_base = OTHER; note = 2'-O-methyladenosine-3'-phosphate
  modified_base 15: mod_base = OTHER; note = 2'-O-methylcytidine-3'-phosphate
  modified_base 16: mod_base = OTHER; note = 2'-O-methyladenosine-3'-phosphate
  modified_base 17: mod_base = OTHER; note = 2'-O-methyluridine-3'-phosphate
  modified_base 18: mod_base = OTHER; note = 2'-O-methylcytidine-3'-phosphate
  modified_base 19: mod_base = OTHER; note = 2'-O-methyluridine-3'-phosphate
  modified_base 20: mod_base = OTHER; note = 2'-O-methyladenosine-3'-phosphate
  modified_base 21: mod_base = OTHER; note 2'-O-methyluridine-3'-phosphate-N-[tris(GalNAc-alkyl)-amido decanoyl)]-4-hydroxyprolinol (Hyp-(GalNAc-alkyl)3)
gagaaattctactacatctat

SEQ ID NO: 177 - RNA, 21 nt, synthetic construct
  source 1..21: mol_type = other RNA
  modified_base 1: mod_base = OTHER; note = 2'-O-methyladenosine-3'-phosphorothioate
  modified_base 2: mod_base = OTHER; note = 2'-O-methylguanosine-3'-phosphorothioate
  modified_base 3: mod_base = OTHER; note = 2'-O-methyladenosine-3'-phosphate
  modified_base 4: mod_base = OTHER; note = 2'-O-methyladenosine-3'-phosphate
  modified_base 5: mod_base = OTHER; note = 2'-O-methyladenosine-3'-phosphate
  modified_base 6: mod_base = OTHER; note = 2'-O-methyluridine-3'-phosphate
  modified_base 7: mod_base = OTHER; note = 2'-deoxy-2'-fluorouridine-3'-phosphate
  modified_base 8: mod_base = OTHER; note = 2'-O-methylcytidine-3'-phosphate
  modified_base 9: mod_base = OTHER; note = 2'-deoxy-2'-fluorouridine-3'-phosphate
  modified_base 10: mod_base = OTHER; note = 2'-deoxy-2'-fluoroadenosine-3'-phosphate
  modified_base 11: mod_base = OTHER; note = 2'-deoxy-2'-fluorocytidine-3'-phosphate
  modified_base 12: mod_base = OTHER; note = 2'-O-methyluridine-3'-phosphate
  modified_base 13: mod_base = OTHER; note = 2'-O-methyladenosine-3'-phosphate
  modified_base 14: mod_base = OTHER; note = 2'-O-methylcytidine-3'-phosphate
  modified_base 15: mod_base = OTHER; note = 2'-O-methyladenosine-3'-phosphate
  modified_base 16: mod_base = OTHER; note = 2'-O-methyluridine-3'-phosphate
  modified_base 17: mod_base = OTHER; note = 2'-O-methylcytidine-3'-phosphate
  modified_base 18: mod_base = OTHER; note = 2'-O-methyluridine-3'-phosphate
  modified_base 19: mod_base = OTHER; note = 2'-O-methyladenosine-3'-phosphate
  modified_base 20: mod_base = OTHER; note = 2'-O-methyluridine-3'-phosphate
  modified_base 21: mod_base = OTHER; note 2'-O-methyluridine-3'-phosphate-N-[tris(GalNAc-alkyl)-amido decanoyl)]-4-hydroxyprolinol (Hyp-(GalNAc-alkyl)3)
agaaattctactacatctatt

SEQ ID NO: 178 - RNA, 21 nt, synthetic construct
  source 1..21: mol_type = other RNA
  modified_base 1: mod_base = OTHER; note = 2'-O-methylcytidine-3'-phosphorothioate
  modified_base 2: mod_base = OTHER; note = 2'-O-methylcytidine-3'-phosphorothioate
  modified_base 3: mod_base = OTHER; note = 2'-O-methylguanosine-3'-phosphate
  modified_base 4: mod_base = OTHER; note = 2'-O-methyladenosine-3'-phosphate
  modified_base 5: mod_base = OTHER; note = 2'-O-methylguanosine-3'-phosphate
  modified_base 6: mod_base = OTHER; note = 2'-O-methylcytidine-3'-phosphate
  modified_base 7: mod_base = OTHER; note = 2'-deoxy-2'-fluorocytidine-3'-phosphate
  modified_base 8: mod_base = OTHER; note = 2'-O-methylguanosine-3'-phosphate
  modified_base 9: mod_base = OTHER; note = 2'-deoxy-2'-fluorouridine-3'-phosphate
  modified_base 10: mod_base = OTHER; note = 2'-deoxy-2'-fluorouridine-3'-phosphate
  modified_base 11: mod_base = OTHER; note = 2'-deoxy-2'-fluorocytidine-3'-phosphate
  modified_base 12: mod_base = OTHER; note = 2'-O-methyluridine-3'-phosphate
  modified_base 13: mod_base = OTHER; note = 2'-O-methylcytidine-3'-phosphate
  modified_base 14: mod_base = OTHER; note = 2'-O-methyluridine-3'-phosphate
  modified_base 15: mod_base = OTHER; note = 2'-O-methyladenosine-3'-phosphate
  modified_base 16: mod_base = OTHER; note = 2'-O-methylcytidine-3'-phosphate
  modified_base 17: mod_base = OTHER; note = 2'-O-methyladenosine-3'-phosphate
  modified_base 18: mod_base = OTHER; note = 2'-O-methyladenosine-3'-phosphate
  modified_base 19: mod_base = OTHER; note = 2'-O-methyluridine-3'-phosphate
  modified_base 20: mod_base = OTHER; note = 2'-O-methyluridine-3'-phosphate
  modified_base 21: mod_base = OTHER; note 2'-O-methyluridine-3'-phosphate-N-[tris(GalNAc-alkyl)-amido decanoyl)]-4-hydroxyprolinol (Hyp-(GalNAc-alkyl)3)
ccgagccgttctctacaattt

SEQ ID NO: 179 - RNA, 21 nt, synthetic construct
  source 1..21: mol_type = other RNA
  modified_base 1: mod_base = OTHER; note = 2'-O-methylcytidine-3'-phosphorothioate
  modified_base 2: mod_base = OTHER; note = 2'-O-methylguanosine-3'-phosphorothioate
  modified_base 3: mod_base = OTHER; note = 2'-O-methyladenosine-3'-phosphate
  modified_base 4: mod_base = OTHER; note = 2'-O-methylguanosine-3'-phosphate
  modified_base 5: mod_base = OTHER; note = 2'-O-methylcytidine-3'-phosphate
  modified_base 6: mod_base = OTHER; note = 2'-O-methylcytidine-3'-phosphate
  modified_base 7: mod_base = OTHER; note = 2'-deoxy-2'-fluoroguanosine-3'-phosphate
  modified_base 8: mod_base = OTHER; note = 2'-O-methyluridine-3'-phosphate
  modified_base 9: mod_base = OTHER; note = 2'-deoxy-2'-fluorouridine-3'-phosphate
  modified_base 10: mod_base = OTHER; note = 2'-deoxy-2'-fluorocytidine-3'-phosphate
  modified_base 11: mod_base = OTHER; note = 2'-deoxy-2'-fluorouridine-3'-phosphate
  modified_base 12: mod_base = OTHER; note = 2'-O-methylcytidine-3'-phosphate
  modified_base 13: mod_base = OTHER; note = 2'-O-methyluridine-3'-phosphate
  modified_base 14: mod_base = OTHER; note = 2'-O-methyladenosine-3'-phosphate
  modified_base 15: mod_base = OTHER; note = 2'-O-methylcytidine-3'-phosphate
  modified_base 16: mod_base = OTHER; note = 2'-O-methyladenosine-3'-phosphate
  modified_base 17: mod_base = OTHER; note = 2'-O-methyladenosine-3'-phosphate
  modified_base 18: mod_base = OTHER; note = 2'-O-methyluridine-3'-phosphate
  modified_base 19: mod_base = OTHER; note = 2'-O-methyluridine-3'-phosphate
  modified_base 20: mod_base = OTHER; note = 2'-O-methyladenosine-3'-phosphate
  modified_base 21: mod_base = OTHER; note 2'-O-methyluridine-3'-phosphate-N-[tris(GalNAc-alkyl)-amido decanoyl)]-4-hydroxyprolinol (Hyp-(GalNAc-alkyl)3)
cgagccgttctctacaattat

SEQ ID NO: 180 - RNA, 21 nt, synthetic construct
  source 1..21: mol_type = other RNA
  modified_base 1: mod_base = OTHER; note = 2'-O-methylguanosine-3'-phosphorothioate
  modified_base 2: mod_base = OTHER; note = 2'-O-methyladenosine-3'-phosphorothioate
  modified_base 3: mod_base = OTHER; note = 2'-O-methylguanosine-3'-phosphate
  modified_base 4: mod_base = OTHER; note = 2'-O-methylcytidine-3'-phosphate
  modified_base 5: mod_base = OTHER; note = 2'-O-methylcytidine-3'-phosphate
  modified_base 6: mod_base = OTHER; note = 2'-O-methylguanosine-3'-phosphate
  modified_base 7: mod_base = OTHER; note = 2'-deoxy-2'-fluorouridine-3'-phosphate
  modified_base 8: mod_base = OTHER; note = 2'-O-methyluridine-3'-phosphate
  modified_base 9: mod_base = OTHER; note = 2'-deoxy-2'-fluorocytidine-3'-phosphate
  modified_base 10: mod_base = OTHER; note = 2'-deoxy-2'-fluorouridine-3'-phosphate
  modified_base 11: mod_base = OTHER; note = 2'-deoxy-2'-fluorocytidine-3'-phosphate
  modified_base 12: mod_base = OTHER; note = 2'-O-methyluridine-3'-phosphate
  modified_base 13: mod_base = OTHER; note = 2'-O-methyladenosine-3'-phosphate
  modified_base 14: mod_base = OTHER; note = 2'-O-methylcytidine-3'-phosphate
  modified_base 15: mod_base = OTHER; note = 2'-O-methyladenosine-3'-phosphate
  modified_base 16: mod_base = OTHER; note = 2'-O-methyladenosine-3'-phosphate
  modified_base 17: mod_base = OTHER; note = 2'-O-methyluridine-3'-phosphate
  modified_base 18: mod_base = OTHER; note = 2'-O-methyluridine-3'-phosphate
  modified_base 19: mod_base = OTHER; note = 2'-O-methyladenosine-3'-phosphate
  modified_base 20: mod_base = OTHER; note = 2'-O-methylcytidine-3'-phosphate
  modified_base 21: mod_base = OTHER; note 2'-O-methyluridine-3'-phosphate-N-[tris(GalNAc-alkyl)-amido decanoyl)]-4-hydroxyprolinol (Hyp-(GalNAc-alkyl)3)
gagccgttctctacaattact

SEQ ID NO: 181 - RNA, 21 nt, synthetic construct
  source 1..21: mol_type = other RNA
ccgagccgttctctacaattt

SEQ ID NO: 182 - RNA, 21 nt, synthetic construct
  source 1..21: mol_type = other RNA
gagaaattctactacatctat

SEQ ID NO: 183 - RNA, 21 nt, synthetic construct
  source 1..21: mol_type = other RNA
agaaattctactacatctatt

SEQ ID NO: 184 - RNA, 21 nt, synthetic construct
  source 1..21: mol_type = other RNA
aaatgagggtttcacagtcaa

SEQ ID NO: 185 - RNA, 21 nt, synthetic construct
  source 1..21: mol_type = other RNA
ctgggaggaccctggtaagca

SEQ ID NO: 186 - RNA, 21 nt, synthetic construct
  source 1..21: mol_type = other RNA
ctaccctactctgttgttcga

SEQ ID NO: 187 - RNA, 21 nt, synthetic construct
  source 1..21: mol_type = other RNA
atgtaccatgctaaggccaaa

SEQ ID NO: 188 - RNA, 21 nt, synthetic construct
  source 1..21: mol_type = other RNA
ctagtgctgtccagtgagaaa

SEQ ID NO: 189 - RNA, 21 nt, synthetic construct
  source 1..21: mol_type = other RNA
accaggaactgaaccttgata

SEQ ID NO: 190 - RNA, 21 nt, synthetic construct
  source 1..21: mol_type = other RNA
caccctcatcatctacctgga

SEQ ID NO: 191 - RNA, 21 nt, synthetic construct
  source 1..21: mol_type = other RNA
agagcgggtacctcttcatca

SEQ ID NO: 192 - RNA, 21 nt, synthetic construct
  source 1..21: mol_type = other RNA
agagcgggtacctcttcatca

SEQ ID NO: 193 - RNA, 21 nt, synthetic construct
  source 1..21: mol_type = other RNA
agagcgggtacctcttcatca

SEQ ID NO: 194 - RNA, 21 nt, synthetic construct
  source 1..21: mol_type = other RNA
ggaggttgtgctgagccggaa

SEQ ID NO: 195 - RNA, 21 nt, synthetic construct
  source 1..21: mol_type = other RNA
acatgggccagtggaagatca

SEQ ID NO: 196 - RNA, 21 nt, synthetic construct
  source 1..21: mol_type = other RNA
gtgggagaagttcggcctaga

SEQ ID NO: 197 - RNA, 21 nt, synthetic construct
  source 1..21: mol_type = other RNA
ccttgtcttctcagaaccaga

SEQ ID NO: 198 - RNA, 21 nt, synthetic construct
  source 1..21: mol_type = other RNA
tgtacaagacccgactggtca

SEQ ID NO: 199 - RNA, 21 nt, synthetic construct
  source 1..21: mol_type = other RNA
tacgtgctgcccagtttcgaa

SEQ ID NO: 200 - RNA, 21 nt, synthetic construct
  source 1..21: mol_type = other RNA
accaggatgccactatgtcta

SEQ ID NO: 201 - RNA, 21 nt, synthetic construct
  source 1..21: mol_type = other RNA
ttcgtgctgaataagaagaat

SEQ ID NO: 202 - RNA, 21 nt, synthetic construct
  source 1..21: mol_type = other RNA
cagagaaattctactacatct

SEQ ID NO: 203 - RNA, 21 nt, synthetic construct
  source 1..21: mol_type = other RNA
ctactgcagctaaaagacttt

SEQ ID NO: 204 - RNA, 21 nt, synthetic construct
  source 1..21: mol_type = other RNA
gagaaccagaaacaatgccat

SEQ ID NO: 205 - RNA, 21 nt, synthetic construct
  source 1..21: mol_type = other RNA
atgtaccatgctaaggccaaa

SEQ ID NO: 206 - RNA, 21 nt, synthetic construct
  source 1..21: mol_type = other RNA
cccgtcgtgcgttggctcaat

SEQ ID NO: 207 - RNA, 21 nt, synthetic construct
  source 1..21: mol_type = other RNA
ctagtgctgtccagtgagaaa

SEQ ID NO: 208 - RNA, 21 nt, synthetic construct
  source 1..21: mol_type = other RNA
aaatgagggtttcacagtcaa

SEQ ID NO: 209 - RNA, 21 nt, synthetic construct
  source 1..21: mol_type = other RNA
tgggcaactccaacaattact

SEQ ID NO: 210 - RNA, 21 nt, synthetic construct
  source 1..21: mol_type = other RNA
tgctaaggccaaagatcaact

SEQ ID NO: 211 - RNA, 21 nt, synthetic construct
  source 1..21: mol_type = other RNA
tgcgatcagaagagaccaagt

SEQ ID NO: 212 - RNA, 21 nt, synthetic construct
  source 1..21: mol_type = other RNA
gacagacaagaccatctacat

SEQ ID NO: 213 - RNA, 21 nt, synthetic construct
  source 1..21: mol_type = other RNA
gtaatgcaggacttcttcatt

SEQ ID NO: 214 - RNA, 21 nt, synthetic construct
  source 1..21: mol_type = other RNA
accaggaactgaaccttgata

SEQ ID NO: 215 - RNA, 21 nt, synthetic construct
  source 1..21: mol_type = other RNA
cgtgcgttggctcaatgaact

SEQ ID NO: 216 - RNA, 21 nt, synthetic construct
  source 1..21: mol_type = other RNA
agtggactatgtgtacaagat

SEQ ID NO: 217 - RNA, 21 nt, synthetic construct
  source 1..21: mol_type = other RNA
tacgtgctgcccagtttcgaa

SEQ ID NO: 218 - RNA, 21 nt, synthetic construct
  source 1..21: mol_type = other RNA
ctaccctactctgttgttcga

SEQ ID NO: 219 - RNA, 21 nt, synthetic construct
  source 1..21: mol_type = other RNA
gtacctcttcatccagacagt

SEQ ID NO: 220 - RNA, 21 nt, synthetic construct
  source 1..21: mol_type = other RNA
caccgtatccactgggaatct

SEQ ID NO: 221 - RNA, 21 nt, synthetic construct
  source 1..21: mol_type = other RNA
tgttcgtgctgaataagaagt

SEQ ID NO: 222 - RNA, 21 nt, synthetic construct
  source 1..21: mol_type = other RNA
cattgagaacccggaaggcat

SEQ ID NO: 223 - RNA, 21 nt, synthetic construct
  source 1..21: mol_type = other RNA
gcctcttcttaacaaatttct

SEQ ID NO: 224 - RNA, 21 nt, synthetic construct
  source 1..21: mol_type = other RNA
tggactatgtgtacaagacct

SEQ ID NO: 225 - RNA, 21 nt, synthetic construct
  source 1..21: mol_type = other RNA
ctgggaggaccctggtaagca

SEQ ID NO: 226 - RNA, 21 nt, synthetic construct
  source 1..21: mol_type = other RNA
ggaggttgtgctgagccggaa

SEQ ID NO: 227 - RNA, 21 nt, synthetic construct
  source 1..21: mol_type = other RNA
actacatgaacctacagagat

SEQ ID NO: 228 - RNA, 21 nt, synthetic construct
  source 1..21: mol_type = other RNA
ccttgtcttctcagaaccaga

SEQ ID NO: 229 - RNA, 21 nt, synthetic construct
  source 1..21: mol_type = other RNA
accaggatgccactatgtcta

SEQ ID NO: 230 - RNA, 21 nt, synthetic construct
  source 1..21: mol_type = other RNA
gcaggcagagcgcagcgggat

SEQ ID NO: 231 - RNA, 21 nt, synthetic construct
  source 1..21: mol_type = other RNA
caccctcatcatctacctgga

SEQ ID NO: 232 - RNA, 21 nt, synthetic construct
  source 1..21: mol_type = other RNA
ccagatccacttcaccaagat

SEQ ID NO: 233 - RNA, 21 nt, synthetic construct
  source 1..21: mol_type = other RNA
acatgggccagtggaagatca

SEQ ID NO: 234 - RNA, 21 nt, synthetic construct
  source 1..21: mol_type = other RNA
ccacagccaaagataagaact

SEQ ID NO: 235 - RNA, 21 nt, synthetic construct
  source 1..21: mol_type = other RNA
tgtacaagacccgactggtca

SEQ ID NO: 236 - RNA, 21 nt, synthetic construct
  source 1..21: mol_type = other RNA
gtgggagaagttcggcctaga

SEQ ID NO: 237 - RNA, 21 nt, synthetic construct
  source 1..21: mol_type = other RNA
agagcgggtacctcttcatca

SEQ ID NO: 238 - RNA, 21 nt, synthetic construct
  source 1..21: mol_type = other RNA
caaggtctacgcctattacat

SEQ ID NO: 239 - RNA, 21 nt, synthetic construct
  source 1..21: mol_type = other RNA
gctgaggagaattgcttcatt

SEQ ID NO: 240 - RNA, 21 nt, synthetic construct
  source 1..21: mol_type = other RNA
gtacctcttcatccagacagt

SEQ ID NO: 241 - RNA, 21 nt, synthetic construct
  source 1..21: mol_type = other RNA
gacagacaagaccatctacat

SEQ ID NO: 242 - RNA, 21 nt, synthetic construct
  source 1..21: mol_type = other RNA
cattgagaacccggaaggcat

SEQ ID NO: 243 - RNA, 21 nt, synthetic construct
  source 1..21: mol_type = other RNA
cagagaaattctactacatct

SEQ ID NO: 244 - RNA, 21 nt, synthetic construct
  source 1..21: mol_type = other RNA
gagaaattctactacatctat

SEQ ID NO: 245 - RNA, 21 nt, synthetic construct
  source 1..21: mol_type = other RNA
agaaattctactacatctatt

SEQ ID NO: 246 - RNA, 21 nt, synthetic construct
  source 1..21: mol_type = other RNA
gcaggcagagcgcagcgggat

SEQ ID NO: 247 - RNA, 21 nt, synthetic construct
  source 1..21: mol_type = other RNA
ccagatccacttcaccaagat

SEQ ID NO: 248 - RNA, 21 nt, synthetic construct
  source 1..21: mol_type = other RNA
tgggcaactccaacaattact

SEQ ID NO: 249 - RNA, 21 nt, synthetic construct
  source 1..21: mol_type = other RNA
tgttcgtgctgaataagaagt

SEQ ID NO: 250 - RNA, 21 nt, synthetic construct
  source 1..21: mol_type = other RNA
ttcgtgctgaataagaagaat

SEQ ID NO: 251 - RNA, 21 nt, synthetic construct
  source 1..21: mol_type = other RNA
gtaatgcaggacttcttcatt

SEQ ID NO: 252 - RNA, 21 nt, synthetic construct
  source 1..21: mol_type = other RNA
ccgagccgttctctacaattt

SEQ ID NO: 253 - RNA, 21 nt, synthetic construct
  source 1..21: mol_type = other RNA
actacatgaacctacagagat

SEQ ID NO: 254 - RNA, 21 nt, synthetic construct
  source 1..21: mol_type = other RNA
gcctcttcttaacaaatttct

SEQ ID NO: 255 - RNA, 21 nt, synthetic construct
  source 1..21: mol_type = other RNA
ccacagccaaagataagaact

SEQ ID NO: 256 - RNA, 21 nt, synthetic construct
  source 1..21: mol_type = other RNA
ctactgcagctaaaagacttt

SEQ ID NO: 257 - RNA, 21 nt, synthetic construct
  source 1..21: mol_type = other RNA
cccgtcgtgcgttggctcaat

SEQ ID NO: 258 - RNA, 21 nt, synthetic construct
  source 1..21: mol_type = other RNA
cgtgcgttggctcaatgaact

SEQ ID NO: 259 - RNA, 21 nt, synthetic construct
  source 1..21: mol_type = other RNA
caccgtatccactgggaatct

SEQ ID NO: 260 - RNA, 21 nt, synthetic construct
  source 1..21: mol_type = other RNA
tgcgatcagaagagaccaagt

SEQ ID NO: 261 - RNA, 21 nt, synthetic construct
  source 1..21: mol_type = other RNA
tgctaaggccaaagatcaact

SEQ ID NO: 262 - RNA, 21 nt, synthetic construct
  source 1..21: mol_type = other RNA
caaggtctacgcctattacat

SEQ ID NO: 263 - RNA, 21 nt, synthetic construct
  source 1..21: mol_type = other RNA
caaggtctacgcctattacat

SEQ ID NO: 264 - RNA, 21 nt, synthetic construct
  source 1..21: mol_type = other RNA
caaggtctacgcctattacat

SEQ ID NO: 265 - RNA, 21 nt, synthetic construct
  source 1..21: mol_type = other RNA
gctgaggagaattgcttcatt

SEQ ID NO: 266 - RNA, 21 nt, synthetic construct
  source 1..21: mol_type = other RNA
gctgaggagaattgcttcatt

SEQ ID NO: 267 - RNA, 21 nt, synthetic construct
  source 1..21: mol_type = other RNA
gctgaggagaattgcttcatt

SEQ ID NO: 268 - RNA, 21 nt, synthetic construct
  source 1..21: mol_type = other RNA
agtggactatgtgtacaagat

SEQ ID NO: 269 - RNA, 21 nt, synthetic construct
  source 1..21: mol_type = other RNA
tggactatgtgtacaagacct

SEQ ID NO: 270 - RNA, 21 nt, synthetic construct
  source 1..21: mol_type = other RNA
gagaaccagaaacaatgccat

SEQ ID NO: 271 - RNA, 21 nt, synthetic construct
  source 1..21: mol_type = other RNA
  modified_base 1: mod_base = OTHER; note = 2'-O-methylcytidine-3'-phosphorothioate
  modified_base 2: mod_base = OTHER; note = 2'-O-methylcytidine-3'-phosphorothioate
  modified_base 3: mod_base = OTHER; note = 2'-O-methylguanosine-3'-phosphate
  modified_base 4: mod_base = OTHER; note = 2'-O-methyladenosine-3'-phosphate
  modified_base 5: mod_base = OTHER; note = 2'-O-methylguanosine-3'-phosphate
  modified_base 6: mod_base = OTHER; note = 2'-O-methylcytidine-3'-phosphate
  modified_base 7: mod_base = OTHER; note = 2'-O-methylcytidine-3'-phosphate
  modified_base 8: mod_base = OTHER; note = 2'-O-methylguanosine-3'-phosphate
  modified_base 9: mod_base = OTHER; note = 2'-deoxy-2'-fluorouridine-3'-phosphate
  modified_base 10: mod_base = OTHER; note = 2'-deoxy-2'-fluorouridine-3'-phosphate
  modified_base 11: mod_base = OTHER; note = 2'-deoxy-2'-fluorocytidine-3'-phosphate
  modified_base 12: mod_base = OTHER; note = 2'-O-methyluridine-3'-phosphate
  modified_base 13: mod_base = OTHER; note = 2'-O-methylcytidine-3'-phosphate
  modified_base 14: mod_base = OTHER; note = 2'-O-methyluridine-3'-phosphate
  modified_base 15: mod_base = OTHER; note = 2'-O-methyladenosine-3'-phosphate
  modified_base 16: mod_base = OTHER; note = 2'-O-methylcytidine-3'-phosphate
  modified_base 17: mod_base = OTHER; note = 2'-O-methyladenosine-3'-phosphate
  modified_base 18: mod_base = OTHER; note = 2'-O-methyladenosine-3'-phosphate
  modified_base 19: mod_base = OTHER; note = 2'-O-methyluridine-3'-phosphate
  modified_base 20: mod_base = OTHER; note = 2'-O-methyluridine-3'-phosphate
  modified_base 21: mod_base = OTHER; note 2'-O-methyluridine-3'-phosphate-N-[tris(GalNAc-alkyl)-amido decanoyl)]-4-hydroxyprolinol (Hyp-(GalNAc-alkyl)3)
ccgagccgttctctacaattt

SEQ ID NO: 272 - RNA, 21 nt, synthetic construct
  source 1..21: mol_type = other RNA
  modified_base 1: mod_base = OTHER; note = 2'-O-methylguanosine-3'-phosphorothioate
  modified_base 2: mod_base = OTHER; note = 2'-O-methyladenosine-3'-phosphorothioate
  modified_base 3: mod_base = OTHER; note = 2'-O-methylguanosine-3'-phosphate
  modified_base 4: mod_base = OTHER; note = 2'-O-methyladenosine-3'-phosphate
  modified_base 5: mod_base = OTHER; note = 2'-O-methyladenosine-3'-phosphate
  modified_base 6: mod_base = OTHER; note = 2'-O-methyladenosine-3'-phosphate
  modified_base 7: mod_base = OTHER; note = 2'-O-methyluridine-3'-phosphate
  modified_base 8: mod_base = OTHER; note = 2'-O-methyluridine-3'-phosphate
  modified_base 9: mod_base = OTHER; note = 2'-deoxy-2'-fluorocytidine-3'-phosphate
  modified_base 10: mod_base = OTHER; note = 2'-deoxy-2'-fluorouridine-3'-phosphate
  modified_base 11: mod_base = OTHER; note = 2'-deoxy-2'-fluoroadenosine-3'-phosphate
  modified_base 12: mod_base = OTHER; note = 2'-O-methylcytidine-3'-phosphate
  modified_base 13: mod_base = OTHER; note = 2'-O-methyluridine-3'-phosphate
  modified_base 14: mod_base = OTHER; note = 2'-O-methyladenosine-3'-phosphate
  modified_base 15: mod_base = OTHER; note = 2'-O-methylcytidine-3'-phosphate
  modified_base 16: mod_base = OTHER; note = 2'-O-methyladenosine-3'-phosphate
  modified_base 17: mod_base = OTHER; note = 2'-O-methyluridine-3'-phosphate
  modified_base 18: mod_base = OTHER; note = 2'-O-methylcytidine-3'-phosphate
  modified_base 19: mod_base = OTHER; note = 2'-O-methyluridine-3'-phosphate
  modified_base 20: mod_base = OTHER; note = 2'-O-methyladenosine-3'-phosphate
  modified_base 21: mod_base = OTHER; note 2'-O-methyluridine-3'-phosphate-N-[tris(GalNAc-alkyl)-amido decanoyl)]-4-hydroxyprolinol (Hyp-(GalNAc-alkyl)3)
gagaaattctactacatctat

SEQ ID NO: 273 - RNA, 21 nt, synthetic construct
  source 1..21: mol_type = other RNA
  modified_base 1: mod_base = OTHER; note = 2'-O-methyladenosine-3'-phosphorothioate
  modified_base 2: mod_base = OTHER; note = 2'-O-methylguanosine-3'-phosphorothioate
  modified_base 3: mod_base = OTHER; note = 2'-O-methyladenosine-3'-phosphate
  modified_base 4: mod_base = OTHER; note = 2'-O-methyladenosine-3'-phosphate
  modified_base 5: mod_base = OTHER; note = 2'-O-methyladenosine-3'-phosphate
  modified_base 6: mod_base = OTHER; note = 2'-O-methyluridine-3'-phosphate
  modified_base 7: mod_base = OTHER; note = 2'-O-methyluridine-3'-phosphate
  modified_base 8: mod_base = OTHER; note = 2'-O-methylcytidine-3'-phosphate
  modified_base 9: mod_base = OTHER; note = 2'-deoxy-2'-fluorouridine-3'-phosphate
  modified_base 10: mod_base = OTHER; note = 2'-deoxy-2'-fluoroadenosine-3'-phosphate
  modified_base 11: mod_base = OTHER; note = 2'-deoxy-2'-fluorocytidine-3'-phosphate
  modified_base 12: mod_base = OTHER; note = 2'-O-methyluridine-3'-phosphate
  modified_base 13: mod_base = OTHER; note = 2'-O-methyladenosine-3'-phosphate
  modified_base 14: mod_base = OTHER; note = 2'-O-methylcytidine-3'-phosphate
  modified_base 15: mod_base = OTHER; note = 2'-O-methyladenosine-3'-phosphate
  modified_base 16: mod_base = OTHER; note = 2'-O-methyluridine-3'-phosphate
  modified_base 17: mod_base = OTHER; note = 2'-O-methylcytidine-3'-phosphate
  modified_base 18: mod_base = OTHER; note = 2'-O-methyluridine-3'-phosphate
  modified_base 19: mod_base = OTHER; note = 2'-O-methyladenosine-3'-phosphate
  modified_base 20: mod_base = OTHER; note = 2'-O-methyluridine-3'-phosphate
  modified_base 21: mod_base = OTHER; note 2'-O-methyluridine-3'-phosphate-N-[tris(GalNAc-alkyl)-amido decanoyl)]-4-hydroxyprolinol (Hyp-(GalNAc-alkyl)3)
agaaattctactacatctatt

SEQ ID NO: 274 - RNA, 21 nt, synthetic construct
  source 1..21: mol_type = other RNA
  modified_base 1: mod_base = OTHER; note = 2'-O-methyladenosine-3'-phosphorothioate
  modified_base 2: mod_base = OTHER; note = 2'-O-methyladenosine-3'-phosphorothioate
  modified_base 3: mod_base = OTHER; note = 2'-O-methyladenosine-3'-phosphate
  modified_base 4: mod_base = OTHER; note = 2'-O-methyluridine-3'-phosphate
  modified_base 5: mod_base = OTHER; note = 2'-O-methylguanosine-3'-phosphate
  modified_base 6: mod_base = OTHER; note = 2'-O-methyladenosine-3'-phosphate
  modified_base 7: mod_base = OTHER; note = 2'-deoxy-2'-fluoroguanosine-3'-phosphate
  modified_base 8: mod_base = OTHER; note = 2'-O-methylguanosine-3'-phosphate
  modified_base 9: mod_base = OTHER; note = 2'-deoxy-2'-fluoroguanosine-3'-phosphate
  modified_base 10: mod_base = OTHER; note = 2'-deoxy-2'-fluorouridine-3'-phosphate
  modified_base 11: mod_base = OTHER; note = 2'-deoxy-2'-fluorouridine-3'-phosphate
  modified_base 12: mod_base = OTHER; note = 2'-O-methyluridine-3'-phosphate
  modified_base 13: mod_base = OTHER; note = 2'-O-methylcytidine-3'-phosphate
  modified_base 14: mod_base = OTHER; note = 2'-O-methyladenosine-3'-phosphate
  modified_base 15: mod_base = OTHER; note = 2'-O-methylcytidine-3'-phosphate
  modified_base 16: mod_base = OTHER; note = 2'-O-methyladenosine-3'-phosphate
  modified_base 17: mod_base = OTHER; note = 2'-O-methylguanosine-3'-phosphate
  modified_base 18: mod_base = OTHER; note = 2'-O-methyluridine-3'-phosphate
  modified_base 19: mod_base = OTHER; note = 2'-O-methylcytidine-3'-phosphate
  modified_base 20: mod_base = OTHER; note = 2'-O-methyladenosine-3'-phosphate
  modified_base 21: mod_base = OTHER; note 2'-O-methyladenosine3'-phosphate-N-[tris(GalNAc-alkyl)-amid odecanoyl)]-4-hydroxyprolinol (Hyp-(GalNAc-alkyl)3)
aaatgagggtttcacagtcaa

SEQ ID NO: 275 - RNA, 21 nt, synthetic construct
  source 1..21: mol_type = other RNA
  modified_base 1: mod_base = OTHER; note = 2'-O-methylcytidine-3'-phosphorothioate
  modified_base 2: mod_base = OTHER; note = 2'-O-methyluridine-3'-phosphorothioate
  modified_base 3: mod_base = OTHER; note = 2'-O-methylguanosine-3'-phosphate
  modified_base 4: mod_base = OTHER; note = 2'-O-methylguanosine-3'-phosphate
  modified_base 5: mod_base = OTHER; note = 2'-O-methylguanosine-3'-phosphate
  modified_base 6: mod_base = OTHER; note = 2'-O-methyladenosine-3'-phosphate
  modified_base 7: mod_base = OTHER; note = 2'-deoxy-2'-fluoroguanosine-3'-phosphate
  modified_base 8: mod_base = OTHER; note = 2'-O-methylguanosine-3'-phosphate
  modified_base 9: mod_base = OTHER; note = 2'-deoxy-2'-fluoroadenosine-3'-phosphate
  modified_base 10: mod_base = OTHER; note = 2'-deoxy-2'-fluorocytidine-3'-phosphate
  modified_base 11: mod_base = OTHER; note = 2'-deoxy-2'-fluorocytidine-3'-phosphate
  modified_base 12: mod_base = OTHER; note = 2'-O-methylcytidine-3'-phosphate
  modified_base 13: mod_base = OTHER; note = 2'-O-methyluridine-3'-phosphate
  modified_base 14: mod_base = OTHER; note = 2'-O-methylguanosine-3'-phosphate
  modified_base 15: mod_base = OTHER; note = 2'-O-methylguanosine-3'-phosphate
  modified_base 16: mod_base = OTHER; note = 2'-O-methyluridine-3'-phosphate
  modified_base 17: mod_base = OTHER; note = 2'-O-methyladenosine-3'-phosphate
  modified_base 18: mod_base = OTHER; note = 2'-O-methyladenosine-3'-phosphate
  modified_base 19: mod_base = OTHER; note = 2'-O-methylguanosine-3'-phosphate
  modified_base 20: mod_base = OTHER; note = 2'-O-methylcytidine-3'-phosphate
  modified_base 21: mod_base = OTHER; note 2'-O-methyladenosine3'-phosphate-N-[tris(GalNAc-alkyl)-amid odecanoyl)]-4-hydroxyprolinol (Hyp-(GalNAc-alkyl)3)
ctgggaggaccctggtaagca

SEQ ID NO: 276 - RNA, 21 nt, synthetic construct
  source 1..21: mol_type = other RNA
  modified_base 1: mod_base = OTHER; note = 2'-O-methylcytidine-3'-phosphorothioate
  modified_base 2: mod_base = OTHER; note = 2'-O-methyluridine-3'-phosphorothioate
  modified_base 3: mod_base = OTHER; note = 2'-O-methyladenosine-3'-phosphate
  modified_base 4: mod_base = OTHER; note = 2'-O-methylcytidine-3'-phosphate
  modified_base 5: mod_base = OTHER; note = 2'-O-methylcytidine-3'-phosphate
  modified_base 6: mod_base = OTHER; note = 2'-O-methylcytidine-3'-phosphate
  modified_base 7: mod_base = OTHER; note = 2'-deoxy-2'-fluorouridine-3'-phosphate
  modified_base 8: mod_base = OTHER; note = 2'-O-methyladenosine-3'-phosphate
  modified_base 9: mod_base = OTHER; note = 2'-deoxy-2'-fluorocytidine-3'-phosphate
  modified_base 10: mod_base = OTHER; note = 2'-deoxy-2'-fluorouridine-3'-phosphate
  modified_base 11: mod_base = OTHER; note = 2'-deoxy-2'-fluorocytidine-3'-phosphate
  modified_base 12: mod_base = OTHER; note = 2'-O-methyluridine-3'-phosphate
  modified_base 13: mod_base = OTHER; note = 2'-O-methylguanosine-3'-phosphate
  modified_base 14: mod_base = OTHER; note = 2'-O-methyluridine-3'-phosphate
  modified_base 15: mod_base = OTHER; note = 2'-O-methyluridine-3'-phosphate
  modified_base 16: mod_base = OTHER; note = 2'-O-methylguanosine-3'-phosphate
  modified_base 17: mod_base = OTHER; note = 2'-O-methyluridine-3'-phosphate
  modified_base 18: mod_base = OTHER; note = 2'-O-methyluridine-3'-phosphate
  modified_base 19: mod_base = OTHER; note = 2'-O-methylcytidine-3'-phosphate
  modified_base 20: mod_base = OTHER; note = 2'-O-methylguanosine-3'-phosphate
  modified_base 21: mod_base = OTHER; note 2'-O-methyladenosine3'-phosphate-N-[tris(GalNAc-alkyl)-amid odecanoyl)]-4-hydroxyprolinol (Hyp-(GalNAc-alkyl)3)
ctaccctactctgttgttcga

SEQ ID NO: 277 - RNA, 21 nt, synthetic construct
  source 1..21: mol_type = other RNA
  modified_base 1: mod_base = OTHER; note = 2'-O-methyladenosine-3'-phosphorothioate
  modified_base 2: mod_base = OTHER; note = 2'-O-methyluridine-3'-phosphorothioate
  modified_base 3: mod_base = OTHER; note = 2'-O-methylguanosine-3'-phosphate
  modified_base 4: mod_base = OTHER; note = 2'-O-methyluridine-3'-phosphate
  modified_base 5: mod_base = OTHER; note = 2'-O-methyladenosine-3'-phosphate
  modified_base 6: mod_base = OTHER; note = 2'-O-methylcytidine-3'-phosphate
  modified_base 7: mod_base = OTHER; note = 2'-deoxy-2'-fluorocytidine-3'-phosphate
  modified_base 8: mod_base = OTHER; note = 2'-O-methyladenosine-3'-phosphate
  modified_base 9: mod_base = OTHER; note = 2'-deoxy-2'-fluorouridine-3'-phosphate
  modified_base 10: mod_base = OTHER; note = 2'-deoxy-2'-fluoroguanosine-3'-phosphate
  modified_base 11: mod_base = OTHER; note = 2'-deoxy-2'-fluorocytidine-3'-phosphate
  modified_base 12: mod_base = OTHER; note = 2'-O-methyluridine-3'-phosphate
  modified_base 13: mod_base = OTHER; note = 2'-O-methyladenosine-3'-phosphate
  modified_base 14: mod_base = OTHER; note = 2'-O-methyladenosine-3'-phosphate
  modified_base 15: mod_base = OTHER; note = 2'-O-methylguanosine-3'-phosphate
  modified_base 16: mod_base = OTHER; note = 2'-O-methylguanosine-3'-phosphate
  modified_base 17: mod_base = OTHER; note = 2'-O-methylcytidine-3'-phosphate
  modified_base 18: mod_base = OTHER; note = 2'-O-methylcytidine-3'-phosphate
  modified_base 19: mod_base = OTHER; note = 2'-O-methyladenosine-3'-phosphate
  modified_base 20: mod_base = OTHER; note = 2'-O-methyladenosine-3'-phosphate
  modified_base 21: mod_base = OTHER; note 2'-O-methyladenosine3'-phosphate-N-[tris(GalNAc-alkyl)-amid odecanoyl)]-4-hydroxyprolinol (Hyp-(GalNAc-alkyl)3)
atgtaccatgctaaggccaaa

SEQ ID NO: 278 - RNA, 21 nt, synthetic construct
  source 1..21: mol_type = other RNA
  modified_base 1: mod_base = OTHER; note = 2'-O-methylcytidine-3'-phosphorothioate
  modified_base 2: mod_base = OTHER; note = 2'-O-methyluridine-3'-phosphorothioate
  modified_base 3: mod_base = OTHER; note = 2'-O-methyladenosine-3'-phosphate
  modified_base 4: mod_base = OTHER; note = 2'-O-methylguanosine-3'-phosphate
  modified_base 5: mod_base = OTHER; note = 2'-O-methyluridine-3'-phosphate
  modified_base 6: mod_base = OTHER; note = 2'-O-methylguanosine-3'-phosphate
  modified_base 7: mod_base = OTHER; note = 2'-deoxy-2'-fluorocytidine-3'-phosphate
  modified_base 8: mod_base = OTHER; note = 2'-O-methyluridine-3'-phosphate
  modified_base 9: mod_base = OTHER; note = 2'-deoxy-2'-fluoroguanosine-3'-phosphate
  modified_base 10: mod_base = OTHER; note = 2'-deoxy-2'-fluorouridine-3'-phosphate
  modified_base 11: mod_base = OTHER; note = 2'-deoxy-2'-fluorocytidine-3'-phosphate
  modified_base 12: mod_base = OTHER; note = 2'-O-methylcytidine-3'-phosphate
  modified_base 13: mod_base = OTHER; note = 2'-O-methyladenosine-3'-phosphate
  modified_base 14: mod_base = OTHER; note = 2'-O-methylguanosine-3'-phosphate
  modified_base 15: mod_base = OTHER; note = 2'-O-methyluridine-3'-phosphate
  modified_base 16: mod_base = OTHER; note = 2'-O-methylguanosine-3'-phosphate
  modified_base 17: mod_base = OTHER; note = 2'-O-methyladenosine-3'-phosphate
  modified_base 18: mod_base = OTHER; note = 2'-O-methylguanosine-3'-phosphate
  modified_base 19: mod_base = OTHER; note = 2'-O-methyladenosine-3'-phosphate
  modified_base 20: mod_base = OTHER; note = 2'-O-methyladenosine-3'-phosphate
  modified_base 21: mod_base = OTHER; note 2'-O-methyladenosine3'-phosphate-N-[tris(GalNAc-alkyl)-amid odecanoyl)]-4-hydroxyprolinol (Hyp-(GalNAc-alkyl)3)
ctagtgctgtccagtgagaaa

SEQ ID NO: 279 - RNA, 21 nt, synthetic construct
  source 1..21: mol_type = other RNA
  modified_base 1: mod_base = OTHER; note = 2'-O-methyladenosine-3'-phosphorothioate
  modified_base 2: mod_base = OTHER; note = 2'-O-methylcytidine-3'-phosphorothioate
  modified_base 3: mod_base = OTHER; note = 2'-O-methylcytidine-3'-phosphate
  modified_base 4: mod_base = OTHER; note = 2'-O-methyladenosine-3'-phosphate
  modified_base 5: mod_base = OTHER; note = 2'-O-methylguanosine-3'-phosphate
  modified_base 6: mod_base = OTHER; note = 2'-O-methylguanosine-3'-phosphate
  modified_base 7: mod_base = OTHER; note = 2'-deoxy-2'-fluoroadenosine-3'-phosphate
  modified_base 8: mod_base = OTHER; note = 2'-O-methyladenosine-3'-phosphate
  modified_base 9: mod_base = OTHER; note = 2'-deoxy-2'-fluorocytidine-3'-phosphate
  modified_base 10: mod_base = OTHER; note = 2'-deoxy-2'-fluorouridine-3'-phosphate
  modified_base 11: mod_base = OTHER; note = 2'-deoxy-2'-fluoroguanosine-3'-phosphate
  modified_base 12: mod_base = OTHER; note = 2'-O-methyladenosine-3'-phosphate
  modified_base 13: mod_base = OTHER; note = 2'-O-methyladenosine-3'-phosphate
  modified_base 14: mod_base = OTHER; note = 2'-O-methylcytidine-3'-phosphate
  modified_base 15: mod_base = OTHER; note = 2'-O-methylcytidine-3'-phosphate
  modified_base 16: mod_base = OTHER; note = 2'-O-methyluridine-3'-phosphate
  modified_base 17: mod_base = OTHER; note = 2'-O-methyluridine-3'-phosphate
  modified_base 18: mod_base = OTHER; note = 2'-O-methylguanosine-3'-phosphate
  modified_base 19: mod_base = OTHER; note = 2'-O-methyladenosine-3'-phosphate
  modified_base 20: mod_base = OTHER; note = 2'-O-methyluridine-3'-phosphate
  modified_base 21: mod_base = OTHER; note 2'-O-methyladenosine3'-phosphate-N-[tris(GalNAc-alkyl)-amid odecanoyl)]-4-hydroxyprolinol (Hyp-(GalNAc-alkyl)3)
accaggaactgaaccttgata

SEQ ID NO: 280 - RNA, 21 nt, synthetic construct
  source 1..21: mol_type = other RNA
  modified_base 1: mod_base = OTHER; note = 2'-O-methylcytidine-3'-phosphorothioate
  modified_base 2: mod_base = OTHER; note = 2'-O-methyladenosine-3'-phosphorothioate
  modified_base 3: mod_base = OTHER; note = 2'-O-methylcytidine-3'-phosphate
  modified_base 4: mod_base = OTHER; note = 2'-O-methylcytidine-3'-phosphate
  modified_base 5: mod_base = OTHER; note = 2'-O-methylcytidine-3'-phosphate
  modified_base 6: mod_base = OTHER; note = 2'-O-methyluridine-3'-phosphate
  modified_base 7: mod_base = OTHER; note = 2'-deoxy-2'-fluorocytidine-3'-phosphate
  modified_base 8: mod_base = OTHER; note = 2'-O-methyladenosine-3'-phosphate
  modified_base 9: mod_base = OTHER; note = 2'-deoxy-2'-fluorouridine-3'-phosphate
  modified_base 10: mod_base = OTHER; note = 2'-deoxy-2'-fluorocytidine-3'-phosphate
  modified_base 11: mod_base = OTHER; note = 2'-deoxy-2'-fluoroadenosine-3'-phosphate
  modified_base 12: mod_base = OTHER; note = 2'-O-methyluridine-3'-phosphate
  modified_base 13: mod_base = OTHER; note = 2'-O-methylcytidine-3'-phosphate
  modified_base 14: mod_base = OTHER; note = 2'-O-methyluridine-3'-phosphate
  modified_base 15: mod_base = OTHER; note = 2'-O-methyladenosine-3'-phosphate
  modified_base 16: mod_base = OTHER; note = 2'-O-methylcytidine-3'-phosphate
  modified_base 17: mod_base = OTHER; note = 2'-O-methylcytidine-3'-phosphate
  modified_base 18: mod_base = OTHER; note = 2'-O-methyluridine-3'-phosphate
  modified_base 19: mod_base = OTHER; note = 2'-O-methylguanosine-3'-phosphate
  modified_base 20: mod_base = OTHER; note = 2'-O-methylguanosine-3'-phosphate
  modified_base 21: mod_base = OTHER; note 2'-O-methyladenosine3'-phosphate-N-[tris(GalNAc-alkyl)-amid odecanoyl)]-4-hydroxyprolinol (Hyp-(GalNAc-alkyl)3)
caccctcatcatctacctgga

SEQ ID NO: 281 - RNA, 21 nt, synthetic construct
  source 1..21: mol_type = other RNA
  modified_base 1: mod_base = OTHER; note = 2'-O-methyladenosine-3'-phosphorothioate
  modified_base 2: mod_base = OTHER; note = 2'-O-methylguanosine-3'-phosphorothioate
  modified_base 3: mod_base = OTHER; note = 2'-O-methyladenosine-3'-phosphate
  modified_base 4: mod_base = OTHER; note = 2'-O-methylguanosine-3'-phosphate
  modified_base 5: mod_base = OTHER; note = 2'-O-methylcytidine-3'-phosphate
  modified_base 6: mod_base = OTHER; note = 2'-O-methylguanosine-3'-phosphate
  modified_base 7: mod_base = OTHER; note = 2'-deoxy-2'-fluoroguanosine-3'-phosphate
  modified_base 8: mod_base = OTHER; note = 2'-O-methylguanosine-3'-phosphate
  modified_base 9: mod_base = OTHER; note = 2'-deoxy-2'-fluorouridine-3'-phosphate
  modified_base 10: mod_base = OTHER; note = 2'-deoxy-2'-fluoroadenosine-3'-phosphate
  modified_base 11: mod_base = OTHER; note = 2'-deoxy-2'-fluorocytidine-3'-phosphate
  modified_base 12: mod_base = OTHER; note = 2'-O-methylcytidine-3'-phosphate
  modified_base 13: mod_base = OTHER; note = 2'-O-methyluridine-3'-phosphate
  modified_base 14: mod_base = OTHER; note = 2'-O-methylcytidine-3'-phosphate
  modified_base 15: mod_base = OTHER; note = 2'-O-methyluridine-3'-phosphate
  modified_base 16: mod_base = OTHER; note = 2'-O-methyluridine-3'-phosphate
  modified_base 17: mod_base = OTHER; note = 2'-O-methylcytidine-3'-phosphate
  modified_base 18: mod_base = OTHER; note = 2'-O-methyladenosine-3'-phosphate
  modified_base 19: mod_base = OTHER; note = 2'-O-methyluridine-3'-phosphate
  modified_base 20: mod_base = OTHER; note = 2'-O-methylcytidine-3'-phosphate
  modified_base 21: mod_base = OTHER; note 2'-O-methyladenosine3'-phosphate-N-[tris(GalNAc-alkyl)-amid odecanoyl)]-4-hydroxyprolinol (Hyp-(GalNAc-alkyl)3)
agagcgggtacctcttcatca

SEQ ID NO: 282 - RNA, 21 nt, synthetic construct
  source 1..21: mol_type = other RNA
  modified_base 1: mod_base = OTHER; note = 2'-O-methyladenosine-3'-phosphorothioate
  modified_base 2: mod_base = OTHER; note = 2'-O-methylguanosine-3'-phosphorothioate
  modified_base 3: mod_base = OTHER; note = 2'-O-methyladenosine-3'-phosphate
  modified_base 4: mod_base = OTHER; note = 2'-O-methylguanosine-3'-phosphate
  modified_base 5: mod_base = OTHER; note = 2'-O-methylcytidine-3'-phosphate
  modified_base 6: mod_base = OTHER; note = 2'-O-methylguanosine-3'-phosphate
  modified_base 7: mod_base = OTHER; note = 2'-deoxy-2'-fluoroguanosine-3'-phosphate
  modified_base 8: mod_base = OTHER; note = 2'-O-methylguanosine-3'-phosphate
  modified_base 9: mod_base = OTHER; note = 2'-deoxy-2'-fluorouridine-3'-phosphate
  modified_base 10: mod_base = OTHER; note = 2'-deoxy-2'-fluoroadenosine-3'-phosphate
  modified_base 11: mod_base = OTHER; note = 2'-deoxy-2'-fluorocytidine-3'-phosphate
  modified_base 12: mod_base = OTHER; note = 2'-O-methylcytidine-3'-phosphate
  modified_base 13: mod_base = OTHER; note = 2'-O-methyluridine-3'-phosphate
  modified_base 14: mod_base = OTHER; note = 2'-O-methylcytidine-3'-phosphate
  modified_base 15: mod_base = OTHER; note = 2'-O-methyluridine-3'-phosphate
  modified_base 16: mod_base = OTHER; note = 2'-O-methyluridine-3'-phosphate
  modified_base 17: mod_base = OTHER; note = 2'-O-methylcytidine-3'-phosphate
  modified_base 18: mod_base = OTHER; note = 2'-O-methyladenosine-3'-phosphate
  modified_base 19: mod_base = OTHER; note = 2'-O-methyluridine-3'-phosphate
  modified_base 20: mod_base = OTHER; note = 2'-O-methylcytidine-3'-phosphate
  modified_base 21: mod_base = OTHER; note 2'-O-methyladenosine3'-phosphate-N-[tris(GalNAc-alkyl)-amid odecanoyl)]-4-hydroxyprolinol (Hyp-(GalNAc-alkyl)3)
agagcgggtacctcttcatca

SEQ ID NO: 283 - RNA, 21 nt, synthetic construct
  source 1..21: mol_type = other RNA
  modified_base 1: mod_base = OTHER; note = 2'-O-methyladenosine-3'-phosphorothioate
  modified_base 2: mod_base = OTHER; note = 2'-O-methylguanosine-3'-phosphorothioate
  modified_base 3: mod_base = OTHER; note = 2'-O-methyladenosine-3'-phosphate
  modified_base 4: mod_base = OTHER; note = 2'-O-methylguanosine-3'-phosphate
  modified_base 5: mod_base = OTHER; note = 2'-O-methylcytidine-3'-phosphate
  modified_base 6: mod_base = OTHER; note = 2'-O-methylguanosine-3'-phosphate
  modified_base 7: mod_base = OTHER; note = 2'-deoxy-2'-fluoroguanosine-3'-phosphate
  modified_base 8: mod_base = OTHER; note = 2'-O-methylguanosine-3'-phosphate
  modified_base 9: mod_base = OTHER; note = 2'-deoxy-2'-fluorouridine-3'-phosphate
  modified_base 10: mod_base = OTHER; note = 2'-deoxy-2'-fluoroadenosine-3'-phosphate
  modified_base 11: mod_base = OTHER; note = 2'-deoxy-2'-fluorocytidine-3'-phosphate
  modified_base 12: mod_base = OTHER; note = 2'-O-methylcytidine-3'-phosphate
  modified_base 13: mod_base = OTHER; note = 2'-O-methyluridine-3'-phosphate
  modified_base 14: mod_base = OTHER; note = 2'-O-methylcytidine-3'-phosphate
  modified_base 15: mod_base = OTHER; note = 2'-O-methyluridine-3'-phosphate
  modified_base 16: mod_base = OTHER; note = 2'-O-methyluridine-3'-phosphate
  modified_base 17: mod_base = OTHER; note = 2'-O-methylcytidine-3'-phosphate
  modified_base 18: mod_base = OTHER; note = 2'-O-methyladenosine-3'-phosphate
  modified_base 19: mod_base = OTHER; note = 2'-O-methyluridine-3'-phosphate
  modified_base 20: mod_base = OTHER; note = 2'-O-methylcytidine-3'-phosphate
  modified_base 21: mod_base = OTHER; note 2'-O-methyladenosine3'-phosphate-N-[tris(GalNAc-alkyl)-amid odecanoyl)]-4-hydroxyprolinol (Hyp-(GalNAc-alkyl)3)
agagcgggtacctcttcatca

SEQ ID NO: 284 - RNA, 21 nt, synthetic construct
  source 1..21: mol_type = other RNA
  modified_base 1: mod_base = OTHER; note = 2'-O-methylguanosine-3'-phosphorothioate
  modified_base 2: mod_base = OTHER; note = 2'-O-methylguanosine-3'-phosphorothioate
  modified_base 3: mod_base = OTHER; note = 2'-O-methyladenosine-3'-phosphate
  modified_base 4: mod_base = OTHER; note = 2'-O-methylguanosine-3'-phosphate
  modified_base 5: mod_base = OTHER; note = 2'-O-methylguanosine-3'-phosphate
  modified_base 6: mod_base = OTHER; note = 2'-O-methyluridine-3'-phosphate
  modified_base 7: mod_base = OTHER; note = 2'-deoxy-2'-fluorouridine-3'-phosphate
  modified_base 8: mod_base = OTHER; note = 2'-O-methylguanosine-3'-phosphate
  modified_base 9: mod_base = OTHER; note = 2'-deoxy-2'-fluorouridine-3'-phosphate
  modified_base 10: mod_base = OTHER; note = 2'-deoxy-2'-fluoroguanosine-3'-phosphate
  modified_base 11: mod_base = OTHER; note = 2'-deoxy-2'-fluorocytidine-3'-phosphate
  modified_base 12: mod_base = OTHER; note = 2'-O-methyluridine-3'-phosphate
  modified_base 13: mod_base = OTHER; note = 2'-O-methylguanosine-3'-phosphate
  modified_base 14: mod_base = OTHER; note = 2'-O-methyladenosine-3'-phosphate
  modified_base 15: mod_base = OTHER; note = 2'-O-methylguanosine-3'-phosphate
  modified_base 16: mod_base = OTHER; note = 2'-O-methylcytidine-3'-phosphate
  modified_base 17: mod_base = OTHER; note = 2'-O-methylcytidine-3'-phosphate
  modified_base 18: mod_base = OTHER; note = 2'-O-methylguanosine-3'-phosphate
  modified_base 19: mod_base = OTHER; note = 2'-O-methylguanosine-3'-phosphate
  modified_base 20: mod_base = OTHER; note = 2'-O-methyladenosine-3'-phosphate
  modified_base 21: mod_base = OTHER; note 2'-O-methyladenosine3'-phosphate-N-[tris(GalNAc-alkyl)-amid odecanoyl)]-4-hydroxyprolinol (Hyp-(GalNAc-alkyl)3)
ggaggttgtgctgagccggaa

SEQ ID NO: 285 - RNA, 21 nt, synthetic construct
  source 1..21: mol_type = other RNA
  modified_base 1: mod_base = OTHER; note = 2'-O-methyladenosine-3'-phosphorothioate
  modified_base 2: mod_base = OTHER; note = 2'-O-methylcytidine-3'-phosphorothioate
  modified_base 3: mod_base = OTHER; note = 2'-O-methyladenosine-3'-phosphate
  modified_base 4: mod_base = OTHER; note = 2'-O-methyluridine-3'-phosphate
  modified_base 5: mod_base = OTHER; note = 2'-O-methylguanosine-3'-phosphate
  modified_base 6: mod_base = OTHER; note = 2'-O-methylguanosine-3'-phosphate
  modified_base 7: mod_base = OTHER; note = 2'-deoxy-2'-fluoroguanosine-3'-phosphate
  modified_base 8: mod_base = OTHER; note = 2'-O-methylcytidine-3'-phosphate
  modified_base 9: mod_base = OTHER; note = 2'-deoxy-2'-fluorocytidine-3'-phosphate
  modified_base 10: mod_base = OTHER; note = 2'-deoxy-2'-fluoroadenosine-3'-phosphate
  modified_base 11: mod_base = OTHER; note = 2'-deoxy-2'-fluoroguanosine-3'-phosphate
  modified_base 12: mod_base = OTHER; note = 2'-O-methyluridine-3'-phosphate
  modified_base 13: mod_base = OTHER; note = 2'-O-methylguanosine-3'-phosphate
  modified_base 14: mod_base = OTHER; note = 2'-O-methylguanosine-3'-phosphate
  modified_base 15: mod_base = OTHER; note = 2'-O-methyladenosine-3'-phosphate
  modified_base 16: mod_base = OTHER; note = 2'-O-methyladenosine-3'-phosphate
  modified_base 17: mod_base = OTHER; note = 2'-O-methylguanosine-3'-phosphate
  modified_base 18: mod_base = OTHER; note = 2'-O-methyladenosine-3'-phosphate
  modified_base 19: mod_base = OTHER; note = 2'-O-methyluridine-3'-phosphate
  modified_base 20: mod_base = OTHER; note = 2'-O-methylcytidine-3'-phosphate
  modified_base 21: mod_base = OTHER; note 2'-O-methyladenosine3'-phosphate-N-[tris(GalNAc-alkyl)-amid odecanoyl)]-4-hydroxyprolinol (Hyp-(GalNAc-alkyl)3)
acatgggccagtggaagatca

SEQ ID NO: 286 - RNA, 21 nt, synthetic construct
  source 1..21: mol_type = other RNA
  modified_base 1: mod_base = OTHER; note = 2'-O-methylguanosine-3'-phosphorothioate
  modified_base 2: mod_base = OTHER; note = 2'-O-methyluridine-3'-phosphorothioate
  modified_base 3: mod_base = OTHER; note = 2'-O-methylguanosine-3'-phosphate
  modified_base 4: mod_base = OTHER; note = 2'-O-methylguanosine-3'-phosphate
  modified_base 5: mod_base = OTHER; note = 2'-O-methylguanosine-3'-phosphate
  modified_base 6: mod_base = OTHER; note = 2'-O-methyladenosine-3'-phosphate
  modified_base 7: mod_base = OTHER; note = 2'-deoxy-2'-fluoroguanosine-3'-phosphate
  modified_base 8: mod_base = OTHER; note = 2'-O-methyladenosine-3'-phosphate
  modified_base 9: mod_base = OTHER; note = 2'-deoxy-2'-fluoroadenosine-3'-phosphate
  modified_base 10: mod_base = OTHER; note = 2'-deoxy-2'-fluoroguanosine-3'-phosphate
  modified_base 11: mod_base = OTHER; note = 2'-deoxy-2'-fluorouridine-3'-phosphate
  modified_base 12: mod_base = OTHER; note = 2'-O-methyluridine-3'-phosphate
  modified_base 13: mod_base = OTHER; note = 2'-O-methylcytidine-3'-phosphate
  modified_base 14: mod_base = OTHER; note = 2'-O-methylguanosine-3'-phosphate
  modified_base 15: mod_base = OTHER; note = 2'-O-methylguanosine-3'-phosphate
  modified_base 16: mod_base = OTHER; note = 2'-O-methylcytidine-3'-phosphate
  modified_base 17: mod_base = OTHER; note = 2'-O-methylcytidine-3'-phosphate
  modified_base 18: mod_base = OTHER; note = 2'-O-methyluridine-3'-phosphate
  modified_base 19: mod_base = OTHER; note = 2'-O-methyladenosine-3'-phosphate
  modified_base 20: mod_base = OTHER; note = 2'-O-methylguanosine-3'-phosphate
  modified_base 21: mod_base = OTHER; note 2'-O-methyladenosine3'-phosphate-N-[tris(GalNAc-alkyl)-amid odecanoyl)]-4-hydroxyprolinol (Hyp-(GalNAc-alkyl)3)
gtgggagaagttcggcctaga

SEQ ID NO: 287 - RNA, 21 nt, synthetic construct
  source 1..21: mol_type = other RNA
  modified_base 1: mod_base = OTHER; note = 2'-O-methylcytidine-3'-phosphorothioate
  modified_base 2: mod_base = OTHER; note = 2'-O-methylcytidine-3'-phosphorothioate
  modified_base 3: mod_base = OTHER; note = 2'-O-methyluridine-3'-phosphate
  modified_base 4: mod_base = OTHER; note = 2'-O-methyluridine-3'-phosphate
  modified_base 5: mod_base = OTHER; note = 2'-O-methylguanosine-3'-phosphate
  modified_base 6: mod_base = OTHER; note = 2'-O-methyluridine-3'-phosphate
  modified_base 7: mod_base = OTHER; note = 2'-deoxy-2'-fluorocytidine-3'-phosphate
  modified_base 8: mod_base = OTHER; note = 2'-O-methyluridine-3'-phosphate
  modified_base 9: mod_base = OTHER; note = 2'-deoxy-2'-fluorouridine-3'-phosphate
  modified_base 10: mod_base = OTHER; note = 2'-deoxy-2'-fluorocytidine-3'-phosphate
  modified_base 11: mod_base = OTHER; note = 2'-deoxy-2'-fluorouridine-3'-phosphate
  modified_base 12: mod_base = OTHER; note = 2'-O-methylcytidine-3'-phosphate
  modified_base 13: mod_base = OTHER; note = 2'-O-methyladenosine-3'-phosphate
  modified_base 14: mod_base = OTHER; note = 2'-O-methylguanosine-3'-phosphate
  modified_base 15: mod_base = OTHER; note = 2'-O-methyladenosine-3'-phosphate
  modified_base 16: mod_base = OTHER; note = 2'-O-methyladenosine-3'-phosphate
  modified_base 17: mod_base = OTHER; note = 2'-O-methylcytidine-3'-phosphate
  modified_base 18: mod_base = OTHER; note = 2'-O-methylcytidine-3'-phosphate
  modified_base 19: mod_base = OTHER; note = 2'-O-methyladenosine-3'-phosphate
  modified_base 20: mod_base = OTHER; note = 2'-O-methylguanosine-3'-phosphate
  modified_base 21: mod_base = OTHER; note 2'-O-methyladenosine3'-phosphate-N-[tris(GalNAc-alkyl)-amid odecanoyl)]-4-hydroxyprolinol (Hyp-(GalNAc-alkyl)3)
ccttgtcttctcagaaccaga

SEQ ID NO: 288 - RNA, 21 nt, synthetic construct
  source 1..21: mol_type = other RNA
  modified_base 1: mod_base = OTHER; note = 2'-O-methyluridine-3'-phosphorothioate
  modified_base 2: mod_base = OTHER; note = 2'-O-methylguanosine-3'-phosphorothioate
  modified_base 3: mod_base = OTHER; note = 2'-O-methyluridine-3'-phosphate
  modified_base 4: mod_base = OTHER; note = 2'-O-methyladenosine-3'-phosphate
  modified_base 5: mod_base = OTHER; note = 2'-O-methylcytidine-3'-phosphate
  modified_base 6: mod_base = OTHER; note = 2'-O-methyladenosine-3'-phosphate
  modified_base 7: mod_base = OTHER; note = 2'-deoxy-2'-fluoroadenosine-3'-phosphate
  modified_base 8: mod_base = OTHER; note = 2'-O-methylguanosine-3'-phosphate
  modified_base 9: mod_base = OTHER; note = 2'-deoxy-2'-fluoroadenosine-3'-phosphate
  modified_base 10: mod_base = OTHER; note = 2'-deoxy-2'-fluorocytidine-3'-phosphate
  modified_base 11: mod_base = OTHER; note = 2'-deoxy-2'-fluorocytidine-3'-phosphate
  modified_base 12: mod_base = OTHER; note = 2'-O-methylcytidine-3'-phosphate
  modified_base 13: mod_base = OTHER; note = 2'-O-methylguanosine-3'-phosphate
  modified_base 14: mod_base = OTHER; note = 2'-O-methyladenosine-3'-phosphate
  modified_base 15: mod_base = OTHER; note = 2'-O-methylcytidine-3'-phosphate
  modified_base 16: mod_base = OTHER; note = 2'-O-methyluridine-3'-phosphate
  modified_base 17: mod_base = OTHER; note = 2'-O-methylguanosine-3'-phosphate
  modified_base 18: mod_base = OTHER; note = 2'-O-methylguanosine-3'-phosphate
  modified_base 19: mod_base = OTHER; note = 2'-O-methyluridine-3'-phosphate
  modified_base 20: mod_base = OTHER; note = 2'-O-methylcytidine-3'-phosphate
  modified_base 21: mod_base = OTHER; note 2'-O-methyladenosine3'-phosphate-N-[tris(GalNAc-alkyl)-amid odecanoyl)]-4-hydroxyprolinol (Hyp-(GalNAc-alkyl)3)
tgtacaagacccgactggtca

SEQ ID NO: 289 - RNA, 21 nt, synthetic construct
  source 1..21: mol_type = other RNA
  modified_base 1: mod_base = OTHER; note = 2'-O-methyluridine-3'-phosphorothioate
  modified_base 2: mod_base = OTHER; note = 2'-O-methyladenosine-3'-phosphorothioate
  modified_base 3: mod_base = OTHER; note = 2'-O-methylcytidine-3'-phosphate
  modified_base 4: mod_base = OTHER; note = 2'-O-methylguanosine-3'-phosphate
  modified_base 5: mod_base = OTHER; note = 2'-O-methyluridine-3'-phosphate
  modified_base 6: mod_base = OTHER; note = 2'-O-methylguanosine-3'-phosphate
  modified_base 7: mod_base = OTHER; note = 2'-deoxy-2'-fluorocytidine-3'-phosphate
  modified_base 8: mod_base = OTHER; note = 2'-O-methyluridine-3'-phosphate
  modified_base 9: mod_base = OTHER; note = 2'-deoxy-2'-fluoroguanosine-3'-phosphate
  modified_base 10: mod_base = OTHER; note = 2'-deoxy-2'-fluorocytidine-3'-phosphate
  modified_base 11: mod_base = OTHER; note = 2'-deoxy-2'-fluorocytidine-3'-phosphate
  modified_base 12: mod_base = OTHER; note = 2'-O-methylcytidine-3'-phosphate
  modified_base 13: mod_base = OTHER; note = 2'-O-methyladenosine-3'-phosphate
  modified_base 14: mod_base = OTHER; note = 2'-O-methylguanosine-3'-phosphate
  modified_base 15: mod_base = OTHER; note = 2'-O-methyluridine-3'-phosphate
  modified_base 16: mod_base = OTHER; note = 2'-O-methyluridine-3'-phosphate
  modified_base 17: mod_base = OTHER; note = 2'-O-methyluridine-3'-phosphate
  modified_base 18: mod_base = OTHER; note = 2'-O-methylcytidine-3'-phosphate
  modified_base 19: mod_base = OTHER; note = 2'-O-methylguanosine-3'-phosphate
  modified_base 20: mod_base = OTHER; note = 2'-O-methyladenosine-3'-phosphate
  modified_base 21: mod_base = OTHER; note 2'-O-methyladenosine3'-phosphate-N-[tris(GalNAc-alkyl)-amid odecanoyl)]-4-hydroxyprolinol (Hyp-(GalNAc-alkyl)3)
tacgtgctgcccagtttcgaa

SEQ ID NO: 290 - RNA, 21 nt, synthetic construct
  source 1..21: mol_type = other RNA
  modified_base 1: mod_base = OTHER; note = 2'-O-methyladenosine-3'-phosphorothioate
  modified_base 2: mod_base = OTHER; note = 2'-O-methylcytidine-3'-phosphorothioate
  modified_base 3: mod_base = OTHER; note = 2'-O-methylcytidine-3'-phosphate
  modified_base 4: mod_base = OTHER; note = 2'-O-methyladenosine-3'-phosphate
  modified_base 5: mod_base = OTHER; note = 2'-O-methylguanosine-3'-phosphate
  modified_base 6: mod_base = OTHER; note = 2'-O-methylguanosine-3'-phosphate
  modified_base 7: mod_base = OTHER; note = 2'-deoxy-2'-fluoroadenosine-3'-phosphate
  modified_base 8: mod_base = OTHER; note = 2'-O-methyluridine-3'-phosphate
  modified_base 9: mod_base = OTHER; note = 2'-deoxy-2'-fluoroguanosine-3'-phosphate
  modified_base 10: mod_base = OTHER; note = 2'-deoxy-2'-fluorocytidine-3'-phosphate
  modified_base 11: mod_base = OTHER; note = 2'-deoxy-2'-fluorocytidine-3'-phosphate
  modified_base 12: mod_base = OTHER; note = 2'-O-methyladenosine-3'-phosphate
  modified_base 13: mod_base = OTHER; note = 2'-O-methylcytidine-3'-phosphate
  modified_base 14: mod_base = OTHER; note = 2'-O-methyluridine-3'-phosphate
  modified_base 15: mod_base = OTHER; note = 2'-O-methyladenosine-3'-phosphate
  modified_base 16: mod_base = OTHER; note = 2'-O-methyluridine-3'-phosphate
  modified_base 17: mod_base = OTHER; note = 2'-O-methylguanosine-3'-phosphate
  modified_base 18: mod_base = OTHER; note = 2'-O-methyluridine-3'-phosphate
  modified_base 19: mod_base = OTHER; note = 2'-O-methylcytidine-3'-phosphate
  modified_base 20: mod_base = OTHER; note = 2'-O-methyluridine-3'-phosphate
  modified_base 21: mod_base = OTHER; note 2'-O-methyladenosine3'-phosphate-N-[tris(GalNAc-alkyl)-amid odecanoyl)]-4-hydroxyprolinol (Hyp-(GalNAc-alkyl)3)
accaggatgccactatgtcta

SEQ ID NO: 291 - RNA, 21 nt, synthetic construct
  source 1..21: mol_type = other RNA
  modified_base 1: mod_base = OTHER; note = 2'-O-methyluridine-3'-phosphorothioate
  modified_base 2: mod_base = OTHER; note = 2'-O-methyluridine-3'-phosphorothioate
  modified_base 3: mod_base = OTHER; note = 2'-O-methylcytidine-3'-phosphate
  modified_base 4: mod_base = OTHER; note = 2'-O-methylguanosine-3'-phosphate
  modified_base 5: mod_base = OTHER; note = 2'-O-methyluridine-3'-phosphate
  modified_base 6: mod_base = OTHER; note = 2'-O-methylguanosine-3'-phosphate
  modified_base 7: mod_base = OTHER; note = 2'-O-methylcytidine-3'-phosphate
  modified_base 8: mod_base = OTHER; note = 2'-O-methyluridine-3'-phosphate
  modified_base 9: mod_base = OTHER; note = 2'-deoxy-2'-fluoroguanosine-3'-phosphate
  modified_base 10: mod_base = OTHER; note = 2'-deoxy-2'-fluoroadenosine-3'-phosphate
  modified_base 11: mod_base = OTHER; note = 2'-deoxy-2'-fluoroadenosine-3'-phosphate
  modified_base 12: mod_base = OTHER; note = 2'-O-methyluridine-3'-phosphate
  modified_base 13: mod_base = OTHER; note = 2'-O-methyladenosine-3'-phosphate
  modified_base 14: mod_base = OTHER; note = 2'-O-methyladenosine-3'-phosphate
  modified_base 15: mod_base = OTHER; note = 2'-O-methylguanosine-3'-phosphate
  modified_base 16: mod_base = OTHER; note = 2'-O-methyladenosine-3'-phosphate
  modified_base 17: mod_base = OTHER; note = 2'-O-methyladenosine-3'-phosphate
  modified_base 18: mod_base = OTHER; note = 2'-O-methylguanosine-3'-phosphate
  modified_base 19: mod_base = OTHER; note = 2'-O-methyladenosine-3'-phosphate
  modified_base 20: mod_base = OTHER; note = 2'-O-methyladenosine-3'-phosphate
  modified_base 21: mod_base = OTHER; note 2'-O-methyluridine-3'-phosphate-N-[tris(GalNAc-alkyl)-amido decanoyl)]-4-hydroxyprolinol (Hyp-(GalNAc-alkyl)3)
ttcgtgctgaataagaagaat

SEQ ID NO: 292 - RNA, 21 nt, synthetic construct
  source 1..21: mol_type = other RNA
  modified_base 1: mod_base = OTHER; note = 2'-O-methylcytidine-3'-phosphorothioate
  modified_base 2: mod_base = OTHER; note = 2'-O-methyladenosine-3'-phosphorothioate
  modified_base 3: mod_base = OTHER; note = 2'-O-methylguanosine-3'-phosphate
  modified_base 4: mod_base = OTHER; note = 2'-O-methyladenosine-3'-phosphate
  modified_base 5: mod_base = OTHER; note = 2'-O-methylguanosine-3'-phosphate
  modified_base 6: mod_base = OTHER; note = 2'-O-methyladenosine-3'-phosphate
  modified_base 7: mod_base = OTHER; note = 2'-O-methyladenosine-3'-phosphate
  modified_base 8: mod_base = OTHER; note = 2'-O-methyladenosine-3'-phosphate
  modified_base 9: mod_base = OTHER; note = 2'-deoxy-2'-fluorouridine-3'-phosphate
  modified_base 10: mod_base = OTHER; note = 2'-deoxy-2'-fluorouridine-3'-phosphate
  modified_base 11: mod_base = OTHER; note = 2'-deoxy-2'-fluorocytidine-3'-phosphate
  modified_base 12: mod_base = OTHER; note = 2'-O-methyluridine-3'-phosphate
  modified_base 13: mod_base = OTHER; note = 2'-O-methyladenosine-3'-phosphate
  modified_base 14: mod_base = OTHER; note = 2'-O-methylcytidine-3'-phosphate
  modified_base 15: mod_base = OTHER; note = 2'-O-methyluridine-3'-phosphate
  modified_base 16: mod_base = OTHER; note = 2'-O-methyladenosine-3'-phosphate
  modified_base 17: mod_base = OTHER; note = 2'-O-methylcytidine-3'-phosphate
  modified_base 18: mod_base = OTHER; note = 2'-O-methyladenosine-3'-phosphate
  modified_base 19: mod_base = OTHER; note = 2'-O-methyluridine-3'-phosphate
  modified_base 20: mod_base = OTHER; note = 2'-O-methylcytidine-3'-phosphate
  modified_base 21: mod_base = OTHER; note 2'-O-methyluridine-3'-phosphate-N-[tris(GalNAc-alkyl)-amido decanoyl)]-4-hydroxyprolinol (Hyp-(GalNAc-alkyl)3)
cagagaaattctactacatct

SEQ ID NO: 293 - RNA, 21 nt, synthetic construct
  source 1..21: mol_type = other RNA
  modified_base 1: mod_base = OTHER; note = 2'-O-methylcytidine-3'-phosphorothioate
  modified_base 2: mod_base = OTHER; note = 2'-O-methyluridine-3'-phosphorothioate
  modified_base 3: mod_base = OTHER; note = 2'-O-methyladenosine-3'-phosphate
  modified_base 4: mod_base = OTHER; note = 2'-O-methylcytidine-3'-phosphate
  modified_base 5: mod_base = OTHER; note = 2'-O-methyluridine-3'-phosphate
  modified_base 6: mod_base = OTHER; note = 2'-O-methylguanosine-3'-phosphate
  modified_base 7: mod_base = OTHER; note = 2'-O-methylcytidine-3'-phosphate
  modified_base 8: mod_base = OTHER; note = 2'-O-methyladenosine-3'-phosphate
  modified_base 9: mod_base = OTHER; note = 2'-deoxy-2'-fluoroguanosine-3'-phosphate
  modified_base 10: mod_base = OTHER; note = 2'-deoxy-2'-fluorocytidine-3'-phosphate
  modified_base 11: mod_base = OTHER; note = 2'-deoxy-2'-fluorouridine-3'-phosphate
  modified_base 12: mod_base = OTHER; note = 2'-O-methyladenosine-3'-phosphate
  modified_base 13: mod_base = OTHER; note = 2'-O-methyladenosine-3'-phosphate
  modified_base 14: mod_base = OTHER; note = 2'-O-methyladenosine-3'-phosphate
  modified_base 15: mod_base = OTHER; note = 2'-O-methyladenosine-3'-phosphate
  modified_base 16: mod_base = OTHER; note = 2'-O-methylguanosine-3'-phosphate
  modified_base 17: mod_base = OTHER; note = 2'-O-methyladenosine-3'-phosphate
  modified_base 18: mod_base = OTHER; note = 2'-O-methylcytidine-3'-phosphate
  modified_base 19: mod_base = OTHER; note = 2'-O-methyluridine-3'-phosphate
  modified_base 20: mod_base = OTHER; note = 2'-O-methyluridine-3'-phosphate
  modified_base 21: mod_base = OTHER; note 2'-O-methyluridine-3'-phosphate-N-[tris(GalNAc-alkyl)-amido decanoyl)]-4-hydroxyprolinol (Hyp-(GalNAc-alkyl)3)
ctactgcagctaaaagacttt

SEQ ID NO: 294 - RNA, 21 nt, synthetic construct
  source 1..21: mol_type = other RNA
  modified_base 1: mod_base = OTHER; note = 2'-O-methylguanosine-3'-phosphorothioate
  modified_base 2: mod_base = OTHER; note = 2'-O-methyladenosine-3'-phosphorothioate
  modified_base 3: mod_base = OTHER; note = 2'-O-methylguanosine-3'-phosphate
  modified_base 4: mod_base = OTHER; note = 2'-O-methyladenosine-3'-phosphate
  modified_base 5: mod_base = OTHER; note = 2'-O-methyladenosine-3'-phosphate
  modified_base 6: mod_base = OTHER; note = 2'-O-methylcytidine-3'-phosphate
  modified_base 7: mod_base = OTHER; note = 2'-O-methylcytidine-3'-phosphate
  modified_base 8: mod_base = OTHER; note = 2'-O-methyladenosine-3'-phosphate
  modified_base 9: mod_base = OTHER; note = 2'-deoxy-2'-fluoroguanosine-3'-phosphate
  modified_base 10: mod_base = OTHER; note = 2'-deoxy-2'-fluoroadenosine-3'-phosphate
  modified_base 11: mod_base = OTHER; note = 2'-deoxy-2'-fluoroadenosine-3'-phosphate
  modified_base 12: mod_base = OTHER; note = 2'-O-methyladenosine-3'-phosphate
  modified_base 13: mod_base = OTHER; note = 2'-O-methylcytidine-3'-phosphate
  modified_base 14: mod_base = OTHER; note = 2'-O-methyladenosine-3'-phosphate
  modified_base 15: mod_base = OTHER; note = 2'-O-methyladenosine-3'-phosphate
  modified_base 16: mod_base = OTHER; note = 2'-O-methyluridine-3'-phosphate
  modified_base 17: mod_base = OTHER; note = 2'-O-methylguanosine-3'-phosphate
  modified_base 18: mod_base = OTHER; note = 2'-O-methylcytidine-3'-phosphate
  modified_base 19: mod_base = OTHER; note = 2'-O-methylcytidine-3'-phosphate
  modified_base 20: mod_base = OTHER; note = 2'-O-methyladenosine-3'-phosphate
  modified_base 21: mod_base = OTHER; note 2'-O-methyluridine-3'-phosphate-N-[tris(GalNAc-alkyl)-amido decanoyl)]-4-hydroxyprolinol (Hyp-(GalNAc-alkyl)3)
gagaaccagaaacaatgccat

SEQ ID NO: 295 - RNA, 21 nt, synthetic construct
  source 1..21: mol_type = other RNA
  modified_base 1: mod_base = OTHER; note = 2'-O-methyladenosine-3'-phosphorothioate
  modified_base 2: mod_base = OTHER; note = 2'-O-methyluridine-3'-phosphorothioate
  modified_base 3: mod_base = OTHER; note = 2'-O-methylguanosine-3'-phosphate
  modified_base 4: mod_base = OTHER; note = 2'-O-methyluridine-3'-phosphate
  modified_base 5: mod_base = OTHER; note = 2'-O-methyladenosine-3'-phosphate
  modified_base 6: mod_base = OTHER; note = 2'-O-methylcytidine-3'-phosphate
  modified_base 7: mod_base = OTHER; note = 2'-O-methylcytidine-3'-phosphate
  modified_base 8: mod_base = OTHER; note = 2'-O-methyladenosine-3'-phosphate
  modified_base 9: mod_base = OTHER; note = 2'-deoxy-2'-fluorouridine-3'-phosphate
  modified_base 10: mod_base = OTHER; note = 2'-deoxy-2'-fluoroguanosine-3'-phosphate
  modified_base 11: mod_base = OTHER; note = 2'-deoxy-2'-fluorocytidine-3'-phosphate
  modified_base 12: mod_base = OTHER; note = 2'-O-methyluridine-3'-phosphate
  modified_base 13: mod_base = OTHER; note = 2'-O-methyladenosine-3'-phosphate
  modified_base 14: mod_base = OTHER; note = 2'-O-methyladenosine-3'-phosphate
  modified_base 15: mod_base = OTHER; note = 2'-O-methylguanosine-3'-phosphate
  modified_base 16: mod_base = OTHER; note = 2'-O-methylguanosine-3'-phosphate
  modified_base 17: mod_base = OTHER; note = 2'-O-methylcytidine-3'-phosphate
  modified_base 18: mod_base = OTHER; note = 2'-O-methylcytidine-3'-phosphate
  modified_base 19: mod_base = OTHER; note = 2'-O-methyladenosine-3'-phosphate
  modified_base 20: mod_base = OTHER; note = 2'-O-methyladenosine-3'-phosphate
  modified_base 21: mod_base = OTHER; note 2'-O-methyladenosine3'-phosphate-N-[tris(GalNAc-alkyl)-amid odecanoyl)]-4-hydroxyprolinol (Hyp-(GalNAc-alkyl)3)
atgtaccatgctaaggccaaa

SEQ ID NO: 296 - RNA, 21 nt, synthetic construct
  source 1..21: mol_type = other RNA
  modified_base 1: mod_base = OTHER; note = 2'-O-methylcytidine-3'-phosphorothioate
  modified_base 2: mod_base = OTHER; note = 2'-O-methylcytidine-3'-phosphorothioate
  modified_base 3: mod_base = OTHER; note = 2'-O-methylcytidine-3'-phosphate
  modified_base 4: mod_base = OTHER; note = 2'-O-methylguanosine-3'-phosphate
  modified_base 5: mod_base = OTHER; note = 2'-O-methyluridine-3'-phosphate
  modified_base 6: mod_base = OTHER; note = 2'-O-methylcytidine-3'-phosphate
  modified_base 7: mod_base = OTHER; note = 2'-O-methylguanosine-3'-phosphate
  modified_base 8: mod_base = OTHER; note = 2'-O-methyluridine-3'-phosphate
  modified_base 9: mod_base = OTHER; note = 2'-deoxy-2'-fluoroguanosine-3'-phosphate
  modified_base 10: mod_base = OTHER; note = 2'-deoxy-2'-fluorocytidine-3'-phosphate
  modified_base 11: mod_base = OTHER; note = 2'-deoxy-2'-fluoroguanosine-3'-phosphate
  modified_base 12: mod_base = OTHER; note = 2'-O-methyluridine-3'-phosphate
  modified_base 13: mod_base = OTHER; note = 2'-O-methyluridine-3'-phosphate
  modified_base 14: mod_base = OTHER; note = 2'-O-methylguanosine-3'-phosphate
  modified_base 15: mod_base = OTHER; note = 2'-O-methylguanosine-3'-phosphate
  modified_base 16: mod_base = OTHER; note = 2'-O-methylcytidine-3'-phosphate
  modified_base 17: mod_base = OTHER; note = 2'-O-methyluridine-3'-phosphate
  modified_base 18: mod_base = OTHER; note = 2'-O-methylcytidine-3'-phosphate
  modified_base 19: mod_base = OTHER; note = 2'-O-methyladenosine-3'-phosphate
  modified_base 20: mod_base = OTHER; note = 2'-O-methyladenosine-3'-phosphate
  modified_base 21: mod_base = OTHER; note 2'-O-methyluridine-3'-phosphate-N-[tris(GalNAc-alkyl)-amido decanoyl)]-4-hydroxyprolinol (Hyp-(GalNAc-alkyl)3)
cccgtcgtgcgttggctcaat

SEQ ID NO: 297 - RNA, 21 nt, synthetic construct
  source 1..21: mol_type = other RNA
  modified_base 1: mod_base = OTHER; note = 2'-O-methylcytidine-3'-phosphorothioate
  modified_base 2: mod_base = OTHER; note = 2'-O-methyluridine-3'-phosphorothioate
  modified_base 3: mod_base = OTHER; note = 2'-O-methyladenosine-3'-phosphate
  modified_base 4: mod_base = OTHER; note = 2'-O-methylguanosine-3'-phosphate
  modified_base 5: mod_base = OTHER; note = 2'-O-methyluridine-3'-phosphate
  modified_base 6: mod_base = OTHER; note = 2'-O-methylguanosine-3'-phosphate
  modified_base 7: mod_base = OTHER; note = 2'-O-methylcytidine-3'-phosphate
  modified_base 8: mod_base = OTHER; note = 2'-O-methyluridine-3'-phosphate
  modified_base 9: mod_base = OTHER; note = 2'-deoxy-2'-fluoroguanosine-3'-phosphate
  modified_base 10: mod_base = OTHER; note = 2'-deoxy-2'-fluorouridine-3'-phosphate
  modified_base 11: mod_base = OTHER; note = 2'-deoxy-2'-fluorocytidine-3'-phosphate
  modified_base 12: mod_base = OTHER; note = 2'-O-methylcytidine-3'-phosphate
  modified_base 13: mod_base = OTHER; note = 2'-O-methyladenosine-3'-phosphate
  modified_base 14: mod_base = OTHER; note = 2'-O-methylguanosine-3'-phosphate
  modified_base 15: mod_base = OTHER; note = 2'-O-methyluridine-3'-phosphate
  modified_base 16: mod_base = OTHER; note = 2'-O-methylguanosine-3'-phosphate
  modified_base 17: mod_base = OTHER; note = 2'-O-methyladenosine-3'-phosphate
  modified_base 18: mod_base = OTHER; note = 2'-O-methylguanosine-3'-phosphate
  modified_base 19: mod_base = OTHER; note = 2'-O-methyladenosine-3'-phosphate
  modified_base 20: mod_base = OTHER; note = 2'-O-methyladenosine-3'-phosphate
  modified_base 21: mod_base = OTHER; note 2'-O-methyladenosine3'-phosphate-N-[tris(GalNAc-alkyl)-amid odecanoyl)]-4-hydroxyprolinol (Hyp-(GalNAc-alkyl)3)
ctagtgctgtccagtgagaaa

SEQ ID NO: 298 - RNA, 21 nt, synthetic construct
  source 1..21: mol_type = other RNA
  modified_base 1: mod_base = OTHER; note = 2'-O-methyladenosine-3'-phosphorothioate
  modified_base 2: mod_base = OTHER; note = 2'-O-methyladenosine-3'-phosphorothioate
  modified_base 3: mod_base = OTHER; note = 2'-O-methyladenosine-3'-phosphate
  modified_base 4: mod_base = OTHER; note = 2'-O-methyluridine-3'-phosphate
  modified_base 5: mod_base = OTHER; note = 2'-O-methylguanosine-3'-phosphate
  modified_base 6: mod_base = OTHER; note = 2'-O-methyladenosine-3'-phosphate
  modified_base 7: mod_base = OTHER; note = 2'-O-methylguanosine-3'-phosphate
  modified_base 8: mod_base = OTHER; note = 2'-O-methylguanosine-3'-phosphate
  modified_base 9: mod_base = OTHER; note = 2'-deoxy-2'-fluoroguanosine-3'-phosphate
  modified_base 10: mod_base = OTHER; note = 2'-deoxy-2'-fluorouridine-3'-phosphate
  modified_base 11: mod_base = OTHER; note = 2'-deoxy-2'-fluorouridine-3'-phosphate
  modified_base 12: mod_base = OTHER; note = 2'-O-methyluridine-3'-phosphate
  modified_base 13: mod_base = OTHER; note = 2'-O-methylcytidine-3'-phosphate
  modified_base 14: mod_base = OTHER; note = 2'-O-methyladenosine-3'-phosphate
  modified_base 15: mod_base = OTHER; note = 2'-O-methylcytidine-3'-phosphate
  modified_base 16: mod_base = OTHER; note = 2'-O-methyladenosine-3'-phosphate
  modified_base 17: mod_base = OTHER; note = 2'-O-methylguanosine-3'-phosphate
  modified_base 18: mod_base = OTHER; note = 2'-O-methyluridine-3'-phosphate
  modified_base 19: mod_base = OTHER; note = 2'-O-methylcytidine-3'-phosphate
  modified_base 20: mod_base = OTHER; note = 2'-O-methyladenosine-3'-phosphate
  modified_base 21: mod_base = OTHER; note 2'-O-methyladenosine3'-phosphate-N-[tris(GalNAc-alkyl)-amid odecanoyl)]-4-hydroxyprolinol (Hyp-(GalNAc-alkyl)3)
aaatgagggtttcacagtcaa

SEQ ID NO: 299 - RNA, 21 nt, synthetic construct
  source 1..21: mol_type = other RNA
  modified_base 1: mod_base = OTHER; note = 2'-O-methyluridine-3'-phosphorothioate
  modified_base 2: mod_base = OTHER; note = 2'-O-methylguanosine-3'-phosphorothioate
  modified_base 3: mod_base = OTHER; note = 2'-O-methylguanosine-3'-phosphate
  modified_base 4: mod_base = OTHER; note = 2'-O-methylguanosine-3'-phosphate
  modified_base 5: mod_base = OTHER; note = 2'-O-methylcytidine-3'-phosphate
  modified_base 6: mod_base = OTHER; note = 2'-O-methyladenosine-3'-phosphate
  modified_base 7: mod_base = OTHER; note = 2'-O-methyladenosine-3'-phosphate
  modified_base 8: mod_base = OTHER; note = 2'-O-methylcytidine-3'-phosphate
  modified_base 9: mod_base = OTHER; note = 2'-deoxy-2'-fluorouridine-3'-phosphate
  modified_base 10: mod_base = OTHER; note = 2'-deoxy-2'-fluorocytidine-3'-phosphate
  modified_base 11: mod_base = OTHER; note = 2'-deoxy-2'-fluorocytidine-3'-phosphate
  modified_base 12: mod_base = OTHER; note = 2'-O-methyladenosine-3'-phosphate
  modified_base 13: mod_base = OTHER; note = 2'-O-methyladenosine-3'-phosphate
  modified_base 14: mod_base = OTHER; note = 2'-O-methylcytidine-3'-phosphate
  modified_base 15: mod_base = OTHER; note = 2'-O-methyladenosine-3'-phosphate
  modified_base 16: mod_base = OTHER; note = 2'-O-methyladenosine-3'-phosphate
  modified_base 17: mod_base = OTHER; note = 2'-O-methyluridine-3'-phosphate
  modified_base 18: mod_base = OTHER; note = 2'-O-methyluridine-3'-phosphate
  modified_base 19: mod_base = OTHER; note = 2'-O-methyladenosine-3'-phosphate
  modified_base 20: mod_base = OTHER; note = 2'-O-methylcytidine-3'-phosphate
  modified_base 21: mod_base = OTHER; note 2'-O-methyluridine-3'-phosphate-N-[tris(GalNAc-alkyl)-amido decanoyl)]-4-hydroxyprolinol (Hyp-(GalNAc-alkyl)3)
tgggcaactccaacaattact

SEQ ID NO: 300 - RNA, 21 nt, synthetic construct
  source 1..21: mol_type = other RNA
  modified_base 1: mod_base = OTHER; note = 2'-O-methyluridine-3'-phosphorothioate
  modified_base 2: mod_base = OTHER; note = 2'-O-methylguanosine-3'-phosphorothioate
  modified_base 3: mod_base = OTHER; note = 2'-O-methylcytidine-3'-phosphate
  modified_base 4: mod_base = OTHER; note = 2'-O-methyluridine-3'-phosphate
  modified_base 5: mod_base = OTHER; note = 2'-O-methyladenosine-3'-phosphate
  modified_base 6: mod_base = OTHER; note = 2'-O-methyladenosine-3'-phosphate
  modified_base 7: mod_base = OTHER; note = 2'-O-methylguanosine-3'-phosphate
  modified_base 8: mod_base = OTHER; note = 2'-O-methylguanosine-3'-phosphate
  modified_base 9: mod_base = OTHER; note = 2'-deoxy-2'-fluorocytidine-3'-phosphate
  modified_base 10: mod_base = OTHER; note = 2'-deoxy-2'-fluorocytidine-3'-phosphate
  modified_base 11: mod_base = OTHER; note = 2'-deoxy-2'-fluoroadenosine-3'-phosphate
  modified_base 12: mod_base = OTHER; note = 2'-O-methyladenosine-3'-phosphate
  modified_base 13: mod_base = OTHER; note = 2'-O-methyladenosine-3'-phosphate
  modified_base 14: mod_base = OTHER; note = 2'-O-methylguanosine-3'-phosphate
  modified_base 15: mod_base = OTHER; note = 2'-O-methyladenosine-3'-phosphate
  modified_base 16: mod_base = OTHER; note = 2'-O-methyluridine-3'-phosphate
  modified_base 17: mod_base = OTHER; note = 2'-O-methylcytidine-3'-phosphate
  modified_base 18: mod_base = OTHER; note = 2'-O-methyladenosine-3'-phosphate
  modified_base 19: mod_base = OTHER; note = 2'-O-methyladenosine-3'-phosphate
  modified_base 20: mod_base = OTHER; note = 2'-O-methylcytidine-3'-phosphate
  modified_base 21: mod_base = OTHER; note 2'-O-methyluridine-3'-phosphate-N-[tris(GalNAc-alkyl)-amido decanoyl)]-4-hydroxyprolinol (Hyp-(GalNAc-alkyl)3)
tgctaaggccaaagatcaact

SEQ ID NO: 301 - RNA, 21 nt, synthetic construct
  source 1..21: mol_type = other RNA
  modified_base 1: mod_base = OTHER; note = 2'-O-methyluridine-3'-phosphorothioate
  modified_base 2: mod_base = OTHER; note = 2'-O-methylguanosine-3'-phosphorothioate
  modified_base 3: mod_base = OTHER; note = 2'-O-methylcytidine-3'-phosphate
  modified_base 4: mod_base = OTHER; note = 2'-O-methylguanosine-3'-phosphate
  modified_base 5: mod_base = OTHER; note = 2'-O-methyladenosine-3'-phosphate
  modified_base 6: mod_base = OTHER; note = 2'-O-methyluridine-3'-phosphate
  modified_base 7: mod_base = OTHER; note = 2'-O-methylcytidine-3'-phosphate
  modified_base 8: mod_base = OTHER; note = 2'-O-methyladenosine-3'-phosphate
  modified_base 9: mod_base = OTHER; note = 2'-deoxy-2'-fluoroguanosine-3'-phosphate
  modified_base 10: mod_base = OTHER; note = 2'-deoxy-2'-fluoroadenosine-3'-phosphate
  modified_base 11: mod_base = OTHER; note = 2'-deoxy-2'-fluoroadenosine-3'-phosphate
  modified_base 12: mod_base = OTHER; note = 2'-O-methylguanosine-3'-phosphate
  modified_base 13: mod_base = OTHER; note = 2'-O-methyladenosine-3'-phosphate
  modified_base 14: mod_base = OTHER; note = 2'-O-methylguanosine-3'-phosphate
  modified_base 15: mod_base = OTHER; note = 2'-O-methyladenosine-3'-phosphate
  modified_base 16: mod_base = OTHER; note = 2'-O-methylcytidine-3'-phosphate
  modified_base 17: mod_base = OTHER; note = 2'-O-methylcytidine-3'-phosphate
  modified_base 18: mod_base = OTHER; note = 2'-O-methyladenosine-3'-phosphate
  modified_base 19: mod_base = OTHER; note = 2'-O-methyladenosine-3'-phosphate
  modified_base 20: mod_base = OTHER; note = 2'-O-methylguanosine-3'-phosphate
  modified_base 21: mod_base = OTHER; note 2'-O-methyluridine-3'-phosphate-N-[tris(GalNAc-alkyl)-amido decanoyl)]-4-hydroxyprolinol (Hyp-(GalNAc-alkyl)3)
tgcgatcagaagagaccaagt

SEQ ID NO: 302 - RNA, 21 nt, synthetic construct
  source 1..21: mol_type = other RNA
  modified_base 1: mod_base = OTHER; note = 2'-O-methylguanosine-3'-phosphorothioate
  modified_base 2: mod_base = OTHER; note = 2'-O-methyladenosine-3'-phosphorothioate
  modified_base 3: mod_base = OTHER; note = 2'-O-methylcytidine-3'-phosphate
  modified_base 4: mod_base = OTHER; note = 2'-O-methyladenosine-3'-phosphate
  modified_base 5: mod_base = OTHER; note = 2'-O-methylguanosine-3'-phosphate
  modified_base 6: mod_base = OTHER; note = 2'-O-methyladenosine-3'-phosphate
  modified_base 7: mod_base = OTHER; note = 2'-O-methylcytidine-3'-phosphate
  modified_base 8: mod_base = OTHER; note = 2'-O-methyladenosine-3'-phosphate
  modified_base 9: mod_base = OTHER; note = 2'-deoxy-2'-fluoroadenosine-3'-phosphate
  modified_base 10: mod_base = OTHER; note = 2'-deoxy-2'-fluoroguanosine-3'-phosphate
  modified_base 11: mod_base = OTHER; note = 2'-deoxy-2'-fluoroadenosine-3'-phosphate
  modified_base 12: mod_base = OTHER; note = 2'-O-methylcytidine-3'-phosphate
  modified_base 13: mod_base = OTHER; note = 2'-O-methylcytidine-3'-phosphate
  modified_base 14: mod_base = OTHER; note = 2'-O-methyladenosine-3'-phosphate
  modified_base 15: mod_base = OTHER; note = 2'-O-methyluridine-3'-phosphate
  modified_base 16: mod_base = OTHER; note = 2'-O-methylcytidine-3'-phosphate
  modified_base 17: mod_base = OTHER; note = 2'-O-methyluridine-3'-phosphate
  modified_base 18: mod_base = OTHER; note = 2'-O-methyladenosine-3'-phosphate
  modified_base 19: mod_base = OTHER; note = 2'-O-methylcytidine-3'-phosphate
  modified_base 20: mod_base = OTHER; note = 2'-O-methyladenosine-3'-phosphate
  modified_base 21: mod_base = OTHER; note 2'-O-methyluridine-3'-phosphate-N-[tris(GalNAc-alkyl)-amido decanoyl)]-4-hydroxyprolinol (Hyp-(GalNAc-alkyl)3)
gacagacaagaccatctacat

SEQ ID NO: 303 - RNA, 21 nt, synthetic construct
  source 1..21: mol_type = other RNA
  modified_base 1: mod_base = OTHER; note = 2'-O-methylguanosine-3'-phosphorothioate
  modified_base 2: mod_base = OTHER; note = 2'-O-methyluridine-3'-phosphorothioate
  modified_base 3: mod_base = OTHER; note = 2'-O-methyladenosine-3'-phosphate
  modified_base 4: mod_base = OTHER; note = 2'-O-methyladenosine-3'-phosphate
  modified_base 5: mod_base = OTHER; note = 2'-O-methyluridine-3'-phosphate
  modified_base 6: mod_base = OTHER; note = 2'-O-methylguanosine-3'-phosphate
  modified_base 7: mod_base = OTHER; note = 2'-O-methylcytidine-3'-phosphate
  modified_base 8: mod_base = OTHER; note = 2'-O-methyladenosine-3'-phosphate
  modified_base 9: mod_base = OTHER; note = 2'-deoxy-2'-fluoroguanosine-3'-phosphate
  modified_base 10: mod_base = OTHER; note = 2'-deoxy-2'-fluoroguanosine-3'-phosphate
  modified_base 11: mod_base = OTHER; note = 2'-deoxy-2'-fluoroadenosine-3'-phosphate
  modified_base 12: mod_base = OTHER; note = 2'-O-methylcytidine-3'-phosphate
  modified_base 13: mod_base = OTHER; note = 2'-O-methyluridine-3'-phosphate
  modified_base 14: mod_base = OTHER; note = 2'-O-methyluridine-3'-phosphate
  modified_base 15: mod_base = OTHER; note = 2'-O-methylcytidine-3'-phosphate
  modified_base 16: mod_base = OTHER; note = 2'-O-methyluridine-3'-phosphate
  modified_base 17: mod_base = OTHER; note = 2'-O-methyluridine-3'-phosphate
  modified_base 18: mod_base = OTHER; note = 2'-O-methylcytidine-3'-phosphate
  modified_base 19: mod_base = OTHER; note = 2'-O-methyladenosine-3'-phosphate
  modified_base 20: mod_base = OTHER; note = 2'-O-methyluridine-3'-phosphate
  modified_base 21: mod_base = OTHER; note 2'-O-methyluridine-3'-phosphate-N-[tris(GalNAc-alkyl)-amido decanoyl)]-4-hydroxyprolinol (Hyp-(GalNAc-alkyl)3)
gtaatgcaggacttcttcatt

SEQ ID NO: 304 - RNA, 21 nt, synthetic construct
  source 1..21: mol_type = other RNA
  modified_base 1: mod_base = OTHER; note = 2'-O-methyladenosine-3'-phosphorothioate
  modified_base 2: mod_base = OTHER; note = 2'-O-methylcytidine-3'-phosphorothioate
  modified_base 3: mod_base = OTHER; note = 2'-O-methylcytidine-3'-phosphate
  modified_base 4: mod_base = OTHER; note = 2'-O-methyladenosine-3'-phosphate
  modified_base 5: mod_base = OTHER; note = 2'-O-methylguanosine-3'-phosphate
  modified_base 6: mod_base = OTHER; note = 2'-O-methylguanosine-3'-phosphate
  modified_base 7: mod_base = OTHER; note = 2'-O-methyladenosine-3'-phosphate
  modified_base 8: mod_base = OTHER; note = 2'-O-methyladenosine-3'-phosphate
  modified_base 9: mod_base = OTHER; note = 2'-deoxy-2'-fluorocytidine-3'-phosphate
  modified_base 10: mod_base = OTHER; note = 2'-deoxy-2'-fluorouridine-3'-phosphate
  modified_base 11: mod_base = OTHER; note = 2'-deoxy-2'-fluoroguanosine-3'-phosphate
  modified_base 12: mod_base = OTHER; note = 2'-O-methyladenosine-3'-phosphate
  modified_base 13: mod_base = OTHER; note = 2'-O-methyladenosine-3'-phosphate
  modified_base 14: mod_base = OTHER; note = 2'-O-methylcytidine-3'-phosphate
  modified_base 15: mod_base = OTHER; note = 2'-O-methylcytidine-3'-phosphate
  modified_base 16: mod_base = OTHER; note = 2'-O-methyluridine-3'-phosphate
  modified_base 17: mod_base = OTHER; note = 2'-O-methyluridine-3'-phosphate
  modified_base 18: mod_base = OTHER; note = 2'-O-methylguanosine-3'-phosphate
  modified_base 19: mod_base = OTHER; note = 2'-O-methyladenosine-3'-phosphate
  modified_base 20: mod_base = OTHER; note = 2'-O-methyluridine-3'-phosphate
  modified_base 21: mod_base = OTHER; note 2'-O-methyladenosine3'-phosphate-N-[tris(GalNAc-alkyl)-amid odecanoyl)]-4-hydroxyprolinol (Hyp-(GalNAc-alkyl)3)
accaggaactgaaccttgata

SEQ ID NO: 305 - RNA, 21 nt, synthetic construct
  source 1..21: mol_type = other RNA
  modified_base 1: mod_base = OTHER; note = 2'-O-methylcytidine-3'-phosphorothioate
  modified_base 2: mod_base = OTHER; note = 2'-O-methylguanosine-3'-phosphorothioate
  modified_base 3: mod_base = OTHER; note = 2'-O-methyluridine-3'-phosphate
  modified_base 4: mod_base = OTHER; note = 2'-O-methylguanosine-3'-phosphate
  modified_base 5: mod_base = OTHER; note = 2'-O-methylcytidine-3'-phosphate
  modified_base 6: mod_base = OTHER; note = 2'-O-methylguanosine-3'-phosphate
  modified_base 7: mod_base = OTHER; note = 2'-O-methyluridine-3'-phosphate
  modified_base 8: mod_base = OTHER; note = 2'-O-methyluridine-3'-phosphate
  modified_base 9: mod_base = OTHER; note = 2'-deoxy-2'-fluoroguanosine-3'-phosphate
  modified_base 10: mod_base = OTHER; note = 2'-deoxy-2'-fluoroguanosine-3'-phosphate
  modified_base 11: mod_base = OTHER; note = 2'-deoxy-2'-fluorocytidine-3'-phosphate
  modified_base 12: mod_base = OTHER; note = 2'-O-methyluridine-3'-phosphate
  modified_base 13: mod_base = OTHER; note = 2'-O-methylcytidine-3'-phosphate
  modified_base 14: mod_base = OTHER; note = 2'-O-methyladenosine-3'-phosphate
  modified_base 15: mod_base = OTHER; note = 2'-O-methyladenosine-3'-phosphate
  modified_base 16: mod_base = OTHER; note = 2'-O-methyluridine-3'-phosphate
  modified_base 17: mod_base = OTHER; note = 2'-O-methylguanosine-3'-phosphate
  modified_base 18: mod_base = OTHER; note = 2'-O-methyladenosine-3'-phosphate
  modified_base 19: mod_base = OTHER; note = 2'-O-methyladenosine-3'-phosphate
  modified_base 20: mod_base = OTHER; note = 2'-O-methylcytidine-3'-phosphate
  modified_base 21: mod_base = OTHER; note 2'-O-methyluridine-3'-phosphate-N-[tris(GalNAc-alkyl)-amido decanoyl)]-4-hydroxyprolinol (Hyp-(GalNAc-alkyl)3)
cgtgcgttggctcaatgaact

SEQ ID NO: 306 - RNA, 21 nt, synthetic construct
  source 1..21: mol_type = other RNA
  modified_base 1: mod_base = OTHER; note = 2'-O-methyladenosine-3'-phosphorothioate
  modified_base 2: mod_base = OTHER; note = 2'-O-methylguanosine-3'-phosphorothioate
  modified_base 3: mod_base = OTHER; note = 2'-O-methyluridine-3'-phosphate
  modified_base 4: mod_base = OTHER; note = 2'-O-methylguanosine-3'-phosphate
  modified_base 5: mod_base = OTHER; note = 2'-O-methylguanosine-3'-phosphate
  modified_base 6: mod_base = OTHER; note = 2'-O-methyladenosine-3'-phosphate
  modified_base 7: mod_base = OTHER; note = 2'-O-methylcytidine-3'-phosphate
  modified_base 8: mod_base = OTHER; note = 2'-O-methyluridine-3'-phosphate
  modified_base 9: mod_base = OTHER; note = 2'-deoxy-2'-fluoroadenosine-3'-phosphate
  modified_base 10: mod_base = OTHER; note = 2'-deoxy-2'-fluorouridine-3'-phosphate
  modified_base 11: mod_base = OTHER; note = 2'-deoxy-2'-fluoroguanosine-3'-phosphate
  modified_base 12: mod_base = OTHER; note = 2'-O-methyluridine-3'-phosphate
  modified_base 13: mod_base = OTHER; note = 2'-O-methylguanosine-3'-phosphate
  modified_base 14: mod_base = OTHER; note = 2'-O-methyluridine-3'-phosphate
  modified_base 15: mod_base = OTHER; note = 2'-O-methyladenosine-3'-phosphate
  modified_base 16: mod_base = OTHER; note = 2'-O-methylcytidine-3'-phosphate
  modified_base 17: mod_base = OTHER; note = 2'-O-methyladenosine-3'-phosphate
  modified_base 18: mod_base = OTHER; note = 2'-O-methyladenosine-3'-phosphate
  modified_base 19: mod_base = OTHER; note = 2'-O-methylguanosine-3'-phosphate
  modified_base 20: mod_base = OTHER; note = 2'-O-methyladenosine-3'-phosphate
  modified_base 21: mod_base = OTHER; note 2'-O-methyluridine-3'-phosphate-N-[tris(GalNAc-alkyl)-amido decanoyl)]-4-hydroxyprolinol (Hyp-(GalNAc-alkyl)3)
agtggactatgtgtacaagat

SEQ ID NO: 307 - RNA, 21 nt, synthetic construct
  source 1..21: mol_type = other RNA
  modified_base 1: mod_base = OTHER; note = 2'-O-methyluridine-3'-phosphorothioate
  modified_base 2: mod_base = OTHER; note = 2'-O-methyladenosine-3'-phosphorothioate
  modified_base 3: mod_base = OTHER; note = 2'-O-methylcytidine-3'-phosphate
  modified_base 4: mod_base = OTHER; note = 2'-O-methylguanosine-3'-phosphate
  modified_base 5: mod_base = OTHER; note = 2'-O-methyluridine-3'-phosphate
  modified_base 6: mod_base = OTHER; note = 2'-O-methylguanosine-3'-phosphate
  modified_base 7: mod_base = OTHER; note = 2'-O-methylcytidine-3'-phosphate
  modified_base 8: mod_base = OTHER; note = 2'-O-methyluridine-3'-phosphate
  modified_base 9: mod_base = OTHER; note = 2'-deoxy-2'-fluoroguanosine-3'-phosphate
  modified_base 10: mod_base = OTHER; note = 2'-deoxy-2'-fluorocytidine-3'-phosphate
  modified_base 11: mod_base = OTHER; note = 2'-deoxy-2'-fluorocytidine-3'-phosphate
  modified_base 12: mod_base = OTHER; note = 2'-O-methylcytidine-3'-phosphate
  modified_base 13: mod_base = OTHER; note = 2'-O-methyladenosine-3'-phosphate
  modified_base 14: mod_base = OTHER; note = 2'-O-methylguanosine-3'-phosphate
  modified_base 15: mod_base = OTHER; note = 2'-O-methyluridine-3'-phosphate
  modified_base 16: mod_base = OTHER; note = 2'-O-methyluridine-3'-phosphate
  modified_base 17: mod_base = OTHER; note = 2'-O-methyluridine-3'-phosphate
  modified_base 18: mod_base = OTHER; note = 2'-O-methylcytidine-3'-phosphate
  modified_base 19: mod_base = OTHER; note = 2'-O-methylguanosine-3'-phosphate
  modified_base 20: mod_base = OTHER; note = 2'-O-methyladenosine-3'-phosphate
  modified_base 21: mod_base = OTHER; note 2'-O-methyladenosine3'-phosphate-N-[tris(GalNAc-alkyl)-amid odecanoyl)]-4-hydroxyprolinol (Hyp-(GalNAc-alkyl)3)
tacgtgctgcccagtttcgaa

SEQ ID NO: 308 - RNA, 21 nt, synthetic construct
  source 1..21: mol_type = other RNA
  modified_base 1: mod_base = OTHER; note = 2'-O-methylcytidine-3'-phosphorothioate
  modified_base 2: mod_base = OTHER; note = 2'-O-methyluridine-3'-phosphorothioate
  modified_base 3: mod_base = OTHER; note = 2'-O-methyladenosine-3'-phosphate
  modified_base 4: mod_base = OTHER; note = 2'-O-methylcytidine-3'-phosphate
  modified_base 5: mod_base = OTHER; note = 2'-O-methylcytidine-3'-phosphate
  modified_base 6: mod_base = OTHER; note = 2'-O-methylcytidine-3'-phosphate
  modified_base 7: mod_base = OTHER; note = 2'-O-methyluridine-3'-phosphate
  modified_base 8: mod_base = OTHER; note = 2'-O-methyladenosine-3'-phosphate
  modified_base 9: mod_base = OTHER; note = 2'-deoxy-2'-fluorocytidine-3'-phosphate
  modified_base 10: mod_base = OTHER; note = 2'-deoxy-2'-fluorouridine-3'-phosphate
  modified_base 11: mod_base = OTHER; note = 2'-deoxy-2'-fluorocytidine-3'-phosphate
  modified_base 12: mod_base = OTHER; note = 2'-O-methyluridine-3'-phosphate
  modified_base 13: mod_base = OTHER; note = 2'-O-methylguanosine-3'-phosphate
  modified_base 14: mod_base = OTHER; note = 2'-O-methyluridine-3'-phosphate
  modified_base 15: mod_base = OTHER; note = 2'-O-methyluridine-3'-phosphate
  modified_base 16: mod_base = OTHER; note = 2'-O-methylguanosine-3'-phosphate
  modified_base 17: mod_base = OTHER; note = 2'-O-methyluridine-3'-phosphate
  modified_base 18: mod_base = OTHER; note = 2'-O-methyluridine-3'-phosphate
  modified_base 19: mod_base = OTHER; note = 2'-O-methylcytidine-3'-phosphate
  modified_base 20: mod_base = OTHER; note = 2'-O-methylguanosine-3'-phosphate
  modified_base 21: mod_base = OTHER; note 2'-O-methyladenosine3'-phosphate-N-[tris(GalNAc-alkyl)-amid odecanoyl)]-4-hydroxyprolinol (Hyp-(GalNAc-alkyl)3)
ctaccctactctgttgttcga

SEQ ID NO: 309 - RNA, 21 nt, synthetic construct
  source 1..21: mol_type = other RNA
  modified_base 1: mod_base = OTHER; note = 2'-O-methylguanosine-3'-phosphorothioate
  modified_base 2: mod_base = OTHER; note = 2'-O-methyluridine-3'-phosphorothioate
  modified_base 3: mod_base = OTHER; note = 2'-O-methyladenosine-3'-phosphate
  modified_base 4: mod_base = OTHER; note = 2'-O-methylcytidine-3'-phosphate
  modified_base 5: mod_base = OTHER; note = 2'-O-methylcytidine-3'-phosphate
  modified_base 6: mod_base = OTHER; note = 2'-O-methyluridine-3'-phosphate
  modified_base 7: mod_base = OTHER; note = 2'-O-methylcytidine-3'-phosphate
  modified_base 8: mod_base = OTHER; note = 2'-O-methyluridine-3'-phosphate
  modified_base 9: mod_base = OTHER; note = 2'-deoxy-2'-fluorouridine-3'-phosphate
  modified_base 10: mod_base = OTHER; note = 2'-deoxy-2'-fluorocytidine-3'-phosphate
  modified_base 11: mod_base = OTHER; note = 2'-deoxy-2'-fluoroadenosine-3'-phosphate
  modified_base 12: mod_base = OTHER; note = 2'-O-methyluridine-3'-phosphate
  modified_base 13: mod_base = OTHER; note = 2'-O-methylcytidine-3'-phosphate
  modified_base 14: mod_base = OTHER; note = 2'-O-methylcytidine-3'-phosphate
  modified_base 15: mod_base = OTHER; note = 2'-O-methyladenosine-3'-phosphate
  modified_base 16: mod_base = OTHER; note = 2'-O-methylguanosine-3'-phosphate
  modified_base 17: mod_base = OTHER; note = 2'-O-methyladenosine-3'-phosphate
  modified_base 18: mod_base = OTHER; note = 2'-O-methylcytidine-3'-phosphate
  modified_base 19: mod_base = OTHER; note = 2'-O-methyladenosine-3'-phosphate
  modified_base 20: mod_base = OTHER; note = 2'-O-methylguanosine-3'-phosphate
  modified_base 21: mod_base = OTHER; note 2'-O-methyluridine-3'-phosphate-N-[tris(GalNAc-alkyl)-amido decanoyl)]-4-hydroxyprolinol (Hyp-(GalNAc-alkyl)3)
gtacctcttcatccagacagt

SEQ ID NO: 310 - RNA, 21 nt, synthetic construct
  source 1..21: mol_type = other RNA
  modified_base 1: mod_base = OTHER; note = 2'-O-methylcytidine-3'-phosphorothioate
  modified_base 2: mod_base = OTHER; note = 2'-O-methyladenosine-3'-phosphorothioate
  modified_base 3: mod_base = OTHER; note = 2'-O-methylcytidine-3'-phosphate
  modified_base 4: mod_base = OTHER; note = 2'-O-methylcytidine-3'-phosphate
  modified_base 5: mod_base = OTHER; note = 2'-O-methylguanosine-3'-phosphate
  modified_base 6: mod_base = OTHER; note = 2'-O-methyluridine-3'-phosphate
  modified_base 7: mod_base = OTHER; note = 2'-O-methyladenosine-3'-phosphate
  modified_base 8: mod_base = OTHER; note = 2'-O-methyluridine-3'-phosphate
  modified_base 9: mod_base = OTHER; note = 2'-deoxy-2'-fluorocytidine-3'-phosphate
  modified_base 10: mod_base = OTHER; note = 2'-deoxy-2'-fluorocytidine-3'-phosphate
  modified_base 11: mod_base = OTHER; note = 2'-deoxy-2'-fluoroadenosine-3'-phosphate
  modified_base 12: mod_base = OTHER; note = 2'-O-methylcytidine-3'-phosphate
  modified_base 13: mod_base = OTHER; note = 2'-O-methyluridine-3'-phosphate
  modified_base 14: mod_base = OTHER; note = 2'-O-methylguanosine-3'-phosphate
  modified_base 15: mod_base = OTHER; note = 2'-O-methylguanosine-3'-phosphate
  modified_base 16: mod_base = OTHER; note = 2'-O-methylguanosine-3'-phosphate
  modified_base 17: mod_base = OTHER; note = 2'-O-methyladenosine-3'-phosphate
  modified_base 18: mod_base = OTHER; note = 2'-O-methyladenosine-3'-phosphate
  modified_base 19: mod_base = OTHER; note = 2'-O-methyluridine-3'-phosphate
  modified_base 20: mod_base = OTHER; note = 2'-O-methylcytidine-3'-phosphate
  modified_base 21: mod_base = OTHER; note 2'-O-methyluridine-3'-phosphate-N-[tris(GalNAc-alkyl)-amido decanoyl)]-4-hydroxyprolinol (Hyp-(GalNAc-alkyl)3)
caccgtatccactgggaatct

SEQ ID NO: 311 - RNA, 21 nt, synthetic construct
  source 1..21: mol_type = other RNA
  modified_base 1: mod_base = OTHER; note = 2'-O-methyluridine-3'-phosphorothioate
  modified_base 2: mod_base = OTHER; note = 2'-O-methylguanosine-3'-phosphorothioate
  modified_base 3: mod_base = OTHER; note = 2'-O-methyluridine-3'-phosphate
  modified_base 4: mod_base = OTHER; note = 2'-O-methyluridine-3'-phosphate
  modified_base 5: mod_base = OTHER; note = 2'-O-methylcytidine-3'-phosphate
  modified_base 6: mod_base = OTHER; note = 2'-O-methylguanosine-3'-phosphate
  modified_base 7: mod_base = OTHER; note = 2'-O-methyluridine-3'-phosphate
  modified_base 8: mod_base = OTHER; note = 2'-O-methylguanosine-3'-phosphate
  modified_base 9: mod_base = OTHER; note = 2'-deoxy-2'-fluorocytidine-3'-phosphate
  modified_base 10: mod_base = OTHER; note = 2'-deoxy-2'-fluorouridine-3'-phosphate
  modified_base 11: mod_base = OTHER; note = 2'-deoxy-2'-fluoroguanosine-3'-phosphate
  modified_base 12: mod_base = OTHER; note = 2'-O-methyladenosine-3'-phosphate
  modified_base 13: mod_base = OTHER; note = 2'-O-methyladenosine-3'-phosphate
  modified_base 14: mod_base = OTHER; note = 2'-O-methyluridine-3'-phosphate
  modified_base 15: mod_base = OTHER; note = 2'-O-methyladenosine-3'-phosphate
  modified_base 16: mod_base = OTHER; note = 2'-O-methyladenosine-3'-phosphate
  modified_base 17: mod_base = OTHER; note = 2'-O-methylguanosine-3'-phosphate
  modified_base 18: mod_base = OTHER; note = 2'-O-methyladenosine-3'-phosphate
  modified_base 19: mod_base = OTHER; note = 2'-O-methyladenosine-3'-phosphate
  modified_base 20: mod_base = OTHER; note = 2'-O-methylguanosine-3'-phosphate
  modified_base 21: mod_base = OTHER; note 2'-O-methyluridine-3'-phosphate-N-[tris(GalNAc-alkyl)-amido decanoyl)]-4-hydroxyprolinol (Hyp-(GalNAc-alkyl)3)
tgttcgtgctgaataagaagt

SEQ ID NO: 312 - RNA, 21 nt, synthetic construct
  source 1..21: mol_type = other RNA
  modified_base 1: mod_base = OTHER; note = 2'-O-methylcytidine-3'-phosphorothioate
  modified_base 2: mod_base = OTHER; note = 2'-O-methyladenosine-3'-phosphorothioate
  modified_base 3: mod_base = OTHER; note = 2'-O-methyluridine-3'-phosphate
  modified_base 4: mod_base = OTHER; note = 2'-O-methyluridine-3'-phosphate
  modified_base 5: mod_base = OTHER; note = 2'-O-methylguanosine-3'-phosphate
  modified_base 6: mod_base = OTHER; note = 2'-O-methyladenosine-3'-phosphate
  modified_base 7: mod_base = OTHER; note = 2'-O-methylguanosine-3'-phosphate
  modified_base 8: mod_base = OTHER; note = 2'-O-methyladenosine-3'-phosphate
  modified_base 9: mod_base = OTHER; note = 2'-deoxy-2'-fluoroadenosine-3'-phosphate
  modified_base 10: mod_base = OTHER; note = 2'-deoxy-2'-fluorocytidine-3'-phosphate
  modified_base 11: mod_base = OTHER; note = 2'-deoxy-2'-fluorocytidine-3'-phosphate
  modified_base 12: mod_base = OTHER; note = 2'-O-methylcytidine-3'-phosphate
  modified_base 13: mod_base = OTHER; note = 2'-O-methylguanosine-3'-phosphate
  modified_base 14: mod_base = OTHER; note = 2'-O-methylguanosine-3'-phosphate
  modified_base 15: mod_base = OTHER; note = 2'-O-methyladenosine-3'-phosphate
  modified_base 16: mod_base = OTHER; note = 2'-O-methyladenosine-3'-phosphate
  modified_base 17: mod_base = OTHER; note = 2'-O-methylguanosine-3'-phosphate
  modified_base 18: mod_base = OTHER; note = 2'-O-methylguanosine-3'-phosphate
  modified_base 19: mod_base = OTHER; note = 2'-O-methylcytidine-3'-phosphate
  modified_base 20: mod_base = OTHER; note = 2'-O-methyladenosine-3'-phosphate
  modified_base 21: mod_base = OTHER; note 2'-O-methyluridine-3'-phosphate-N-[tris(GalNAc-alkyl)-amido decanoyl)]-4-hydroxyprolinol (Hyp-(GalNAc-alkyl)3)
cattgagaacccggaaggcat

SEQ ID NO: 313 - RNA, 21 nt, synthetic construct
  source 1..21: mol_type = other RNA
  modified_base 1: mod_base = OTHER; note = 2'-O-methylguanosine-3'-phosphorothioate
  modified_base 2: mod_base = OTHER; note = 2'-O-methylcytidine-3'-phosphorothioate
  modified_base 3: mod_base = OTHER; note = 2'-O-methylcytidine-3'-phosphate
  modified_base 4: mod_base = OTHER; note = 2'-O-methyluridine-3'-phosphate
  modified_base 5: mod_base = OTHER; note = 2'-O-methylcytidine-3'-phosphate
  modified_base 6: mod_base = OTHER; note = 2'-O-methyluridine-3'-phosphate
  modified_base 7: mod_base = OTHER; note = 2'-O-methyluridine-3'-phosphate
  modified_base 8: mod_base = OTHER; note = 2'-O-methylcytidine-3'-phosphate
  modified_base 9: mod_base = OTHER; note = 2'-deoxy-2'-fluorouridine-3'-phosphate
  modified_base 10: mod_base = OTHER; note = 2'-deoxy-2'-fluorouridine-3'-phosphate
  modified_base 11: mod_base = OTHER; note = 2'-deoxy-2'-fluoroadenosine-3'-phosphate
  modified_base 12: mod_base = OTHER; note = 2'-O-methyladenosine-3'-phosphate
  modified_base 13: mod_base = OTHER; note = 2'-O-methylcytidine-3'-phosphate
  modified_base 14: mod_base = OTHER; note = 2'-O-methyladenosine-3'-phosphate
  modified_base 15: mod_base = OTHER; note = 2'-O-methyladenosine-3'-phosphate
  modified_base 16: mod_base = OTHER; note = 2'-O-methyladenosine-3'-phosphate
  modified_base 17: mod_base = OTHER; note = 2'-O-methyluridine-3'-phosphate
  modified_base 18: mod_base = OTHER; note = 2'-O-methyluridine-3'-phosphate
  modified_base 19: mod_base = OTHER; note = 2'-O-methyluridine-3'-phosphate
  modified_base 20: mod_base = OTHER; note = 2'-O-methylcytidine-3'-phosphate
  modified_base 21: mod_base = OTHER; note 2'-O-methyluridine-3'-phosphate-N-[tris(GalNAc-alkyl)-amido decanoyl)]-4-hydroxyprolinol (Hyp-(GalNAc-alkyl)3)
gcctcttcttaacaaatttct

SEQ ID NO: 314 - RNA, 21 nt, synthetic construct
  source 1..21: mol_type = other RNA
  modified_base 1: mod_base = OTHER; note = 2'-O-methyluridine-3'-phosphorothioate
  modified_base 2: mod_base = OTHER; note = 2'-O-methylguanosine-3'-phosphorothioate
  modified_base 3: mod_base = OTHER; note = 2'-O-methylguanosine-3'-phosphate
  modified_base 4: mod_base = OTHER; note = 2'-O-methyladenosine-3'-phosphate
  modified_base 5: mod_base = OTHER; note = 2'-O-methylcytidine-3'-phosphate
  modified_base 6: mod_base = OTHER; note = 2'-O-methyluridine-3'-phosphate
  modified_base 7: mod_base = OTHER; note = 2'-O-methyladenosine-3'-phosphate
  modified_base 8: mod_base = OTHER; note = 2'-O-methyluridine-3'-phosphate
  modified_base 9: mod_base = OTHER; note = 2'-deoxy-2'-fluoroguanosine-3'-phosphate
  modified_base 10: mod_base = OTHER; note = 2'-deoxy-2'-fluorouridine-3'-phosphate
  modified_base 11: mod_base = OTHER; note = 2'-deoxy-2'-fluoroguanosine-3'-phosphate
  modified_base 12: mod_base = OTHER; note = 2'-O-methyluridine-3'-phosphate
  modified_base 13: mod_base = OTHER; note = 2'-O-methyladenosine-3'-phosphate
  modified_base 14: mod_base = OTHER; note = 2'-O-methylcytidine-3'-phosphate
  modified_base 15: mod_base = OTHER; note = 2'-O-methyladenosine-3'-phosphate
  modified_base 16: mod_base = OTHER; note = 2'-O-methyladenosine-3'-phosphate
  modified_base 17: mod_base = OTHER; note = 2'-O-methylguanosine-3'-phosphate
  modified_base 18: mod_base = OTHER; note = 2'-O-methyladenosine-3'-phosphate
  modified_base 19: mod_base = OTHER; note = 2'-O-methylcytidine-3'-phosphate
  modified_base 20: mod_base = OTHER; note = 2'-O-methylcytidine-3'-phosphate
  modified_base 21: mod_base = OTHER; note 2'-O-methyluridine-3'-phosphate-N-[tris(GalNAc-alkyl)-amido decanoyl)]-4-hydroxyprolinol (Hyp-(GalNAc-alkyl)3)
tggactatgtgtacaagacct

SEQ ID NO: 315 - RNA, 21 nt, synthetic construct
  source 1..21: mol_type = other RNA
  modified_base 1: mod_base = OTHER; note = 2'-O-methylcytidine-3'-phosphorothioate
  modified_base 2: mod_base = OTHER; note = 2'-O-methyluridine-3'-phosphorothioate
  modified_base 3: mod_base = OTHER; note = 2'-O-methylguanosine-3'-phosphate
  modified_base 4: mod_base = OTHER; note = 2'-O-methylguanosine-3'-phosphate
  modified_base 5: mod_base = OTHER; note = 2'-O-methylguanosine-3'-phosphate
  modified_base 6: mod_base = OTHER; note = 2'-O-methyladenosine-3'-phosphate
  modified_base 7: mod_base = OTHER; note = 2'-O-methylguanosine-3'-phosphate
  modified_base 8: mod_base = OTHER; note = 2'-O-methylguanosine-3'-phosphate
  modified_base 9: mod_base = OTHER; note = 2'-deoxy-2'-fluoroadenosine-3'-phosphate
  modified_base 10: mod_base = OTHER; note = 2'-deoxy-2'-fluorocytidine-3'-phosphate
  modified_base 11: mod_base = OTHER; note = 2'-deoxy-2'-fluorocytidine-3'-phosphate
  modified_base 12: mod_base = OTHER; note = 2'-O-methylcytidine-3'-phosphate
  modified_base 13: mod_base = OTHER; note = 2'-O-methyluridine-3'-phosphate
  modified_base 14: mod_base = OTHER; note = 2'-O-methylguanosine-3'-phosphate
  modified_base 15: mod_base = OTHER; note = 2'-O-methylguanosine-3'-phosphate
  modified_base 16: mod_base = OTHER; note = 2'-O-methyluridine-3'-phosphate
  modified_base 17: mod_base = OTHER; note = 2'-O-methyladenosine-3'-phosphate
  modified_base 18: mod_base = OTHER; note = 2'-O-methyladenosine-3'-phosphate
  modified_base 19: mod_base = OTHER; note = 2'-O-methylguanosine-3'-phosphate
  modified_base 20: mod_base = OTHER; note = 2'-O-methylcytidine-3'-phosphate
  modified_base 21: mod_base = OTHER; note 2'-O-methyladenosine3'-phosphate-N-[tris(GalNAc-alkyl)-amid odecanoyl)]-4-hydroxyprolinol (Hyp-(GalNAc-alkyl)3)
ctgggaggaccctggtaagca

SEQ ID NO: 316 - RNA, 21 nt, synthetic construct
  source 1..21: mol_type = other RNA
  modified_base 1: mod_base = OTHER; note = 2'-O-methylguanosine-3'-phosphorothioate
  modified_base 2: mod_base = OTHER; note = 2'-O-methylguanosine-3'-phosphorothioate
  modified_base 3: mod_base = OTHER; note = 2'-O-methyladenosine-3'-phosphate
  modified_base 4: mod_base = OTHER; note = 2'-O-methylguanosine-3'-phosphate
  modified_base 5: mod_base = OTHER; note = 2'-O-methylguanosine-3'-phosphate
  modified_base 6: mod_base = OTHER; note = 2'-O-methyluridine-3'-phosphate
  modified_base 7: mod_base = OTHER; note = 2'-O-methyluridine-3'-phosphate
  modified_base 8: mod_base = OTHER; note = 2'-O-methylguanosine-3'-phosphate
  modified_base 9: mod_base = OTHER; note = 2'-deoxy-2'-fluorouridine-3'-phosphate
  modified_base 10: mod_base = OTHER; note = 2'-deoxy-2'-fluoroguanosine-3'-phosphate
  modified_base 11: mod_base = OTHER; note = 2'-deoxy-2'-fluorocytidine-3'-phosphate
  modified_base 12: mod_base = OTHER; note = 2'-O-methyluridine-3'-phosphate
  modified_base 13: mod_base = OTHER; note = 2'-O-methylguanosine-3'-phosphate
  modified_base 14: mod_base = OTHER; note = 2'-O-methyladenosine-3'-phosphate
  modified_base 15: mod_base = OTHER; note = 2'-O-methylguanosine-3'-phosphate
  modified_base 16: mod_base = OTHER; note = 2'-O-methylcytidine-3'-phosphate
  modified_base 17: mod_base = OTHER; note = 2'-O-methylcytidine-3'-phosphate
  modified_base 18: mod_base = OTHER; note = 2'-O-methylguanosine-3'-phosphate
  modified_base 19: mod_base = OTHER; note = 2'-O-methylguanosine-3'-phosphate
  modified_base 20: mod_base = OTHER; note = 2'-O-methyladenosine-3'-phosphate
  modified_base 21: mod_base = OTHER; note 2'-O-methyladenosine3'-phosphate-N-[tris(GalNAc-alkyl)-amid odecanoyl)]-4-hydroxyprolinol (Hyp-(GalNAc-alkyl)3)
ggaggttgtgctgagccggaa

SEQ ID NO: 317 - RNA, 21 nt, synthetic construct
  source 1..21: mol_type = other RNA
  modified_base 1: mod_base = OTHER; note = 2'-O-methyladenosine-3'-phosphorothioate
  modified_base 2: mod_base = OTHER; note = 2'-O-methylcytidine-3'-phosphorothioate
  modified_base 3: mod_base = OTHER; note = 2'-O-methyluridine-3'-phosphate
  modified_base 4: mod_base = OTHER; note = 2'-O-methyladenosine-3'-phosphate
  modified_base 5: mod_base = OTHER; note = 2'-O-methylcytidine-3'-phosphate
  modified_base 6: mod_base = OTHER; note = 2'-O-methyladenosine-3'-phosphate
  modified_base 7: mod_base = OTHER; note = 2'-O-methyluridine-3'-phosphate
  modified_base 8: mod_base = OTHER; note = 2'-O-methylguanosine-3'-phosphate
  modified_base 9: mod_base = OTHER; note = 2'-deoxy-2'-fluoroadenosine-3'-phosphate
  modified_base 10: mod_base = OTHER; note = 2'-deoxy-2'-fluoroadenosine-3'-phosphate
  modified_base 11: mod_base = OTHER; note = 2'-deoxy-2'-fluorocytidine-3'-phosphate
  modified_base 12: mod_base = OTHER; note = 2'-O-methylcytidine-3'-phosphate
  modified_base 13: mod_base = OTHER; note = 2'-O-methyluridine-3'-phosphate
  modified_base 14: mod_base = OTHER; note = 2'-O-methyladenosine-3'-phosphate
  modified_base 15: mod_base = OTHER; note = 2'-O-methylcytidine-3'-phosphate
  modified_base 16: mod_base = OTHER; note = 2'-O-methyladenosine-3'-phosphate
  modified_base 17: mod_base = OTHER; note = 2'-O-methylguanosine-3'-phosphate
  modified_base 18: mod_base = OTHER; note = 2'-O-methyladenosine-3'-phosphate
  modified_base 19: mod_base = OTHER; note = 2'-O-methylguanosine-3'-phosphate
  modified_base 20: mod_base = OTHER; note = 2'-O-methyladenosine-3'-phosphate
  modified_base 21: mod_base = OTHER; note 2'-O-methyluridine-3'-phosphate-N-[tris(GalNAc-alkyl)-amido decanoyl)]-4-hydroxyprolinol (Hyp-(GalNAc-alkyl)3)
actacatgaacctacagagat

SEQ ID NO: 318 - RNA, 21 nt, synthetic construct
  source 1..21: mol_type = other RNA
  modified_base 1: mod_base = OTHER; note = 2'-O-methylcytidine-3'-phosphorothioate
  modified_base 2: mod_base = OTHER; note = 2'-O-methylcytidine-3'-phosphorothioate
  modified_base 3: mod_base = OTHER; note = 2'-O-methyluridine-3'-phosphate
  modified_base 4: mod_base = OTHER; note = 2'-O-methyluridine-3'-phosphate
  modified_base 5: mod_base = OTHER; note = 2'-O-methylguanosine-3'-phosphate
  modified_base 6: mod_base = OTHER; note = 2'-O-methyluridine-3'-phosphate
  modified_base 7: mod_base = OTHER; note = 2'-O-methylcytidine-3'-phosphate
  modified_base 8: mod_base = OTHER; note = 2'-O-methyluridine-3'-phosphate
  modified_base 9: mod_base = OTHER; note = 2'-deoxy-2'-fluorouridine-3'-phosphate
  modified_base 10: mod_base = OTHER; note = 2'-deoxy-2'-fluorocytidine-3'-phosphate
  modified_base 11: mod_base = OTHER; note = 2'-deoxy-2'-fluorouridine-3'-phosphate
  modified_base 12: mod_base = OTHER; note = 2'-O-methylcytidine-3'-phosphate
  modified_base 13: mod_base = OTHER; note = 2'-O-methyladenosine-3'-phosphate
  modified_base 14: mod_base = OTHER; note = 2'-O-methylguanosine-3'-phosphate
  modified_base 15: mod_base = OTHER; note = 2'-O-methyladenosine-3'-phosphate
  modified_base 16: mod_base = OTHER; note = 2'-O-methyladenosine-3'-phosphate
  modified_base 17: mod_base = OTHER; note = 2'-O-methylcytidine-3'-phosphate
  modified_base 18: mod_base = OTHER; note = 2'-O-methylcytidine-3'-phosphate
  modified_base 19: mod_base = OTHER; note = 2'-O-methyladenosine-3'-phosphate
  modified_base 20: mod_base = OTHER; note = 2'-O-methylguanosine-3'-phosphate
  modified_base 21: mod_base = OTHER; note 2'-O-methyladenosine3'-phosphate-N-[tris(GalNAc-alkyl)-amid odecanoyl)]-4-hydroxyprolinol (Hyp-(GalNAc-alkyl)3)
ccttgtcttctcagaaccaga

SEQ ID NO: 319 - RNA, 21 nt, synthetic construct
  source 1..21: mol_type = other RNA
  modified_base 1: mod_base = OTHER; note = 2'-O-methyladenosine-3'-phosphorothioate
  modified_base 2: mod_base = OTHER; note = 2'-O-methylcytidine-3'-phosphorothioate
  modified_base 3: mod_base = OTHER; note = 2'-O-methylcytidine-3'-phosphate
  modified_base 4: mod_base = OTHER; note = 2'-O-methyladenosine-3'-phosphate
  modified_base 5: mod_base = OTHER; note = 2'-O-methylguanosine-3'-phosphate
  modified_base 6: mod_base = OTHER; note = 2'-O-methylguanosine-3'-phosphate
  modified_base 7: mod_base = OTHER; note = 2'-O-methyladenosine-3'-phosphate
  modified_base 8: mod_base = OTHER; note = 2'-O-methyluridine-3'-phosphate
  modified_base 9: mod_base = OTHER; note = 2'-deoxy-2'-fluoroguanosine-3'-phosphate
  modified_base 10: mod_base = OTHER; note = 2'-deoxy-2'-fluorocytidine-3'-phosphate
  modified_base 11: mod_base = OTHER; note = 2'-deoxy-2'-fluorocytidine-3'-phosphate
  modified_base 12: mod_base = OTHER; note = 2'-O-methyladenosine-3'-phosphate
  modified_base 13: mod_base = OTHER; note = 2'-O-methylcytidine-3'-phosphate
  modified_base 14: mod_base = OTHER; note = 2'-O-methyluridine-3'-phosphate
  modified_base 15: mod_base = OTHER; note = 2'-O-methyladenosine-3'-phosphate
  modified_base 16: mod_base = OTHER; note = 2'-O-methyluridine-3'-phosphate
  modified_base 17: mod_base = OTHER; note = 2'-O-methylguanosine-3'-phosphate
  modified_base 18: mod_base = OTHER; note = 2'-O-methyluridine-3'-phosphate
  modified_base 19: mod_base = OTHER; note = 2'-O-methylcytidine-3'-phosphate
  modified_base 20: mod_base = OTHER; note = 2'-O-methyluridine-3'-phosphate
  modified_base 21: mod_base = OTHER; note 2'-O-methyladenosine3'-phosphate-N-[tris(GalNAc-alkyl)-amid odecanoyl)]-4-hydroxyprolinol (Hyp-(GalNAc-alkyl)3)
accaggatgccactatgtcta

SEQ ID NO: 320 - RNA, 21 nt, synthetic construct
  source 1..21: mol_type = other RNA
  modified_base 1: mod_base = OTHER; note = 2'-O-methylguanosine-3'-phosphorothioate
  modified_base 2: mod_base = OTHER; note = 2'-O-methylcytidine-3'-phosphorothioate
  modified_base 3: mod_base = OTHER; note = 2'-O-methyladenosine-3'-phosphate
  modified_base 4: mod_base = OTHER; note = 2'-O-methylguanosine-3'-phosphate
  modified_base 5: mod_base = OTHER; note = 2'-O-methylguanosine-3'-phosphate
  modified_base 6: mod_base = OTHER; note = 2'-O-methylcytidine-3'-phosphate
  modified_base 7: mod_base = OTHER; note = 2'-O-methyladenosine-3'-phosphate
  modified_base 8: mod_base = OTHER; note = 2'-O-methylguanosine-3'-phosphate
  modified_base 9: mod_base = OTHER; note = 2'-deoxy-2'-fluoroadenosine-3'-phosphate
  modified_base 10: mod_base = OTHER; note = 2'-deoxy-2'-fluoroguanosine-3'-phosphate
  modified_base 11: mod_base = OTHER; note = 2'-deoxy-2'-fluorocytidine-3'-phosphate
  modified_base 12: mod_base = OTHER; note = 2'-O-methylguanosine-3'-phosphate
  modified_base 13: mod_base = OTHER; note = 2'-O-methylcytidine-3'-phosphate
  modified_base 14: mod_base = OTHER; note = 2'-O-methyladenosine-3'-phosphate
  modified_base 15: mod_base = OTHER; note = 2'-O-methylguanosine-3'-phosphate
  modified_base 16: mod_base = OTHER; note = 2'-O-methylcytidine-3'-phosphate
  modified_base 17: mod_base = OTHER; note = 2'-O-methylguanosine-3'-phosphate
  modified_base 18: mod_base = OTHER; note = 2'-O-methylguanosine-3'-phosphate
  modified_base 19: mod_base = OTHER; note = 2'-O-methylguanosine-3'-phosphate
  modified_base 20: mod_base = OTHER; note = 2'-O-methyladenosine-3'-phosphate
  modified_base 21: mod_base = OTHER; note 2'-O-methyluridine-3'-phosphate-N-[tris(GalNAc-alkyl)-amido decanoyl)]-4-hydroxyprolinol (Hyp-(GalNAc-alkyl)3)
gcaggcagagcgcagcgggat

SEQ ID NO: 321 - RNA, 21 nt, synthetic construct
  source 1..21: mol_type = other RNA
  modified_base 1: mod_base = OTHER; note = 2'-O-methylcytidine-3'-phosphorothioate
  modified_base 2: mod_base = OTHER; note = 2'-O-methyladenosine-3'-phosphorothioate
  modified_base 3: mod_base = OTHER; note = 2'-O-methylcytidine-3'-phosphate
  modified_base 4: mod_base = OTHER; note = 2'-O-methylcytidine-3'-phosphate
  modified_base 5: mod_base = OTHER; note = 2'-O-methylcytidine-3'-phosphate
  modified_base 6: mod_base = OTHER; note = 2'-O-methyluridine-3'-phosphate
  modified_base 7: mod_base = OTHER; note = 2'-O-methylcytidine-3'-phosphate
  modified_base 8: mod_base = OTHER; note = 2'-O-methyladenosine-3'-phosphate
  modified_base 9: mod_base = OTHER; note = 2'-deoxy-2'-fluorouridine-3'-phosphate
  modified_base 10: mod_base = OTHER; note = 2'-deoxy-2'-fluorocytidine-3'-phosphate
  modified_base 11: mod_base = OTHER; note = 2'-deoxy-2'-fluoroadenosine-3'-phosphate
  modified_base 12: mod_base = OTHER; note = 2'-O-methyluridine-3'-phosphate
  modified_base 13: mod_base = OTHER; note = 2'-O-methylcytidine-3'-phosphate
  modified_base 14: mod_base = OTHER; note = 2'-O-methyluridine-3'-phosphate
  modified_base 15: mod_base = OTHER; note = 2'-O-methyladenosine-3'-phosphate
  modified_base 16: mod_base = OTHER; note = 2'-O-methylcytidine-3'-phosphate
  modified_base 17: mod_base = OTHER; note = 2'-O-methylcytidine-3'-phosphate
  modified_base 18: mod_base = OTHER; note = 2'-O-methyluridine-3'-phosphate
  modified_base 19: mod_base = OTHER; note = 2'-O-methylguanosine-3'-phosphate
  modified_base 20: mod_base = OTHER; note = 2'-O-methylguanosine-3'-phosphate
  modified_base 21: mod_base = OTHER; note 2'-O-methyladenosine3'-phosphate-N-[tris(GalNAc-alkyl)-amid odecanoyl)]-4-hydroxyprolinol (Hyp-(GalNAc-alkyl)3)
caccctcatcatctacctgga

SEQ ID NO: 322 - RNA, 21 nt, synthetic construct
  source 1..21: mol_type = other RNA
  modified_base 1: mod_base = OTHER; note = 2'-O-methylcytidine-3'-phosphorothioate
  modified_base 2: mod_base = OTHER; note = 2'-O-methylcytidine-3'-phosphorothioate
  modified_base 3: mod_base = OTHER; note = 2'-O-methyladenosine-3'-phosphate
  modified_base 4: mod_base = OTHER; note = 2'-O-methylguanosine-3'-phosphate
  modified_base 5: mod_base = OTHER; note = 2'-O-methyladenosine-3'-phosphate
  modified_base 6: mod_base = OTHER; note = 2'-O-methyluridine-3'-phosphate
  modified_base 7: mod_base = OTHER; note = 2'-O-methylcytidine-3'-phosphate
  modified_base 8: mod_base = OTHER; note = 2'-O-methylcytidine-3'-phosphate
  modified_base 9: mod_base = OTHER; note = 2'-deoxy-2'-fluoroadenosine-3'-phosphate
  modified_base 10: mod_base = OTHER; note = 2'-deoxy-2'-fluorocytidine-3'-phosphate
  modified_base 11: mod_base = OTHER; note = 2'-deoxy-2'-fluorouridine-3'-phosphate
  modified_base 12: mod_base = OTHER; note = 2'-O-methyluridine-3'-phosphate
  modified_base 13: mod_base = OTHER; note = 2'-O-methylcytidine-3'-phosphate
  modified_base 14: mod_base = OTHER; note = 2'-O-methyladenosine-3'-phosphate
  modified_base 15: mod_base = OTHER; note = 2'-O-methylcytidine-3'-phosphate
  modified_base 16: mod_base = OTHER; note = 2'-O-methylcytidine-3'-phosphate
  modified_base 17: mod_base = OTHER; note = 2'-O-methyladenosine-3'-phosphate
  modified_base 18: mod_base = OTHER; note = 2'-O-methyladenosine-3'-phosphate
  modified_base 19: mod_base = OTHER; note = 2'-O-methylguanosine-3'-phosphate
  modified_base 20: mod_base = OTHER; note = 2'-O-methyladenosine-3'-phosphate
  modified_base 21: mod_base = OTHER; note 2'-O-methyluridine-3'-phosphate-N-[tris(GalNAc-alkyl)-amido decanoyl)]-4-hydroxyprolinol (Hyp-(GalNAc-alkyl)3)
ccagatccacttcaccaagat

SEQ ID NO: 323 - RNA, 21 nt, synthetic construct
  source 1..21: mol_type = other RNA
  modified_base 1: mod_base = OTHER; note = 2'-O-methyladenosine-3'-phosphorothioate
  modified_base 2: mod_base = OTHER; note = 2'-O-methylcytidine-3'-phosphorothioate
  modified_base 3: mod_base = OTHER; note = 2'-O-methyladenosine-3'-phosphate
  modified_base 4: mod_base = OTHER; note = 2'-O-methyluridine-3'-phosphate
  modified_base 5: mod_base = OTHER; note = 2'-O-methylguanosine-3'-phosphate
  modified_base 6: mod_base = OTHER; note = 2'-O-methylguanosine-3'-phosphate
  modified_base 7: mod_base = OTHER; note = 2'-O-methylguanosine-3'-phosphate
  modified_base 8: mod_base = OTHER; note = 2'-O-methylcytidine-3'-phosphate
  modified_base 9: mod_base = OTHER; note = 2'-deoxy-2'-fluorocytidine-3'-phosphate
  modified_base 10: mod_base = OTHER; note = 2'-deoxy-2'-fluoroadenosine-3'-phosphate
  modified_base 11: mod_base = OTHER; note = 2'-deoxy-2'-fluoroguanosine-3'-phosphate
  modified_base 12: mod_base = OTHER; note = 2'-O-methyluridine-3'-phosphate
  modified_base 13: mod_base = OTHER; note = 2'-O-methylguanosine-3'-phosphate
  modified_base 14: mod_base = OTHER; note = 2'-O-methylguanosine-3'-phosphate
  modified_base 15: mod_base = OTHER; note = 2'-O-methyladenosine-3'-phosphate
  modified_base 16: mod_base = OTHER; note = 2'-O-methyladenosine-3'-phosphate
  modified_base 17: mod_base = OTHER; note = 2'-O-methylguanosine-3'-phosphate
  modified_base 18: mod_base = OTHER; note = 2'-O-methyladenosine-3'-phosphate
  modified_base 19: mod_base = OTHER; note = 2'-O-methyluridine-3'-phosphate
  modified_base 20: mod_base = OTHER; note = 2'-O-methylcytidine-3'-phosphate
  modified_base 21: mod_base = OTHER; note 2'-O-methyladenosine3'-phosphate-N-[tris(GalNAc-alkyl)-amid odecanoyl)]-4-hydroxyprolinol (Hyp-(GalNAc-alkyl)3)
acatgggccagtggaagatca

SEQ ID NO: 324 - RNA, 21 nt, synthetic construct
  source 1..21: mol_type = other RNA
  modified_base 1: mod_base = OTHER; note = 2'-O-methylcytidine-3'-phosphorothioate
  modified_base 2: mod_base = OTHER; note = 2'-O-methylcytidine-3'-phosphorothioate
  modified_base 3: mod_base = OTHER; note = 2'-O-methyladenosine-3'-phosphate
  modified_base 4: mod_base = OTHER; note = 2'-O-methylcytidine-3'-phosphate
  modified_base 5: mod_base = OTHER; note = 2'-O-methyladenosine-3'-phosphate
  modified_base 6: mod_base = OTHER; note = 2'-O-methylguanosine-3'-phosphate
  modified_base 7: mod_base = OTHER; note = 2'-O-methylcytidine-3'-phosphate
  modified_base 8: mod_base = OTHER; note = 2'-O-methylcytidine-3'-phosphate
  modified_base 9: mod_base = OTHER; note = 2'-deoxy-2'-fluoroadenosine-3'-phosphate
  modified_base 10: mod_base = OTHER; note = 2'-deoxy-2'-fluoroadenosine-3'-phosphate
  modified_base 11: mod_base = OTHER; note = 2'-deoxy-2'-fluoroadenosine-3'-phosphate
  modified_base 12: mod_base = OTHER; note = 2'-O-methylguanosine-3'-phosphate
  modified_base 13: mod_base = OTHER; note = 2'-O-methyladenosine-3'-phosphate
  modified_base 14: mod_base = OTHER; note = 2'-O-methyluridine-3'-phosphate
  modified_base 15: mod_base = OTHER; note = 2'-O-methyladenosine-3'-phosphate
  modified_base 16: mod_base = OTHER; note = 2'-O-methyladenosine-3'-phosphate
  modified_base 17: mod_base = OTHER; note = 2'-O-methylguanosine-3'-phosphate
  modified_base 18: mod_base = OTHER; note = 2'-O-methyladenosine-3'-phosphate
  modified_base 19: mod_base = OTHER; note = 2'-O-methyladenosine-3'-phosphate
  modified_base 20: mod_base = OTHER; note = 2'-O-methylcytidine-3'-phosphate
  modified_base 21: mod_base = OTHER; note 2'-O-methyluridine-3'-phosphate-N-[tris(GalNAc-alkyl)-amido decanoyl)]-4-hydroxyprolinol (Hyp-(GalNAc-alkyl)3)
ccacagccaaagataagaact

SEQ ID NO: 325 - RNA, 21 nt, synthetic construct
  source 1..21: mol_type = other RNA
  modified_base 1: mod_base = OTHER; note = 2'-O-methyluridine-3'-phosphorothioate
  modified_base 2: mod_base = OTHER; note = 2'-O-methylguanosine-3'-phosphorothioate
  modified_base 3: mod_base = OTHER; note = 2'-O-methyluridine-3'-phosphate
  modified_base 4: mod_base = OTHER; note = 2'-O-methyladenosine-3'-phosphate
  modified_base 5: mod_base = OTHER; note = 2'-O-methylcytidine-3'-phosphate
  modified_base 6: mod_base = OTHER; note = 2'-O-methyladenosine-3'-phosphate
  modified_base 7: mod_base = OTHER; note = 2'-O-methyladenosine-3'-phosphate
  modified_base 8: mod_base = OTHER; note = 2'-O-methylguanosine-3'-phosphate
  modified_base 9: mod_base = OTHER; note = 2'-deoxy-2'-fluoroadenosine-3'-phosphate
  modified_base 10: mod_base = OTHER; note = 2'-deoxy-2'-fluorocytidine-3'-phosphate
  modified_base 11: mod_base = OTHER; note = 2'-deoxy-2'-fluorocytidine-3'-phosphate
  modified_base 12: mod_base = OTHER; note = 2'-O-methylcytidine-3'-phosphate
  modified_base 13: mod_base = OTHER; note = 2'-O-methylguanosine-3'-phosphate
  modified_base 14: mod_base = OTHER; note = 2'-O-methyladenosine-3'-phosphate
  modified_base 15: mod_base = OTHER; note = 2'-O-methylcytidine-3'-phosphate
  modified_base 16: mod_base = OTHER; note = 2'-O-methyluridine-3'-phosphate
  modified_base 17: mod_base = OTHER; note = 2'-O-methylguanosine-3'-phosphate
  modified_base 18: mod_base = OTHER; note = 2'-O-methylguanosine-3'-phosphate
  modified_base 19: mod_base = OTHER; note = 2'-O-methyluridine-3'-phosphate
  modified_base 20: mod_base = OTHER; note = 2'-O-methylcytidine-3'-phosphate
  modified_base 21: mod_base = OTHER; note 2'-O-methyladenosine3'-phosphate-N-[tris(GalNAc-alkyl)-amid odecanoyl)]-4-hydroxyprolinol (Hyp-(GalNAc-alkyl)3)
tgtacaagacccgactggtca

SEQ ID NO: 326 - RNA, 21 nt, synthetic construct
  source 1..21: mol_type = other RNA
  modified_base 1: mod_base = OTHER; note = 2'-O-methylguanosine-3'-phosphorothioate
  modified_base 2: mod_base = OTHER; note = 2'-O-methyluridine-3'-phosphorothioate
  modified_base 3: mod_base = OTHER; note = 2'-O-methylguanosine-3'-phosphate
  modified_base 4: mod_base = OTHER; note = 2'-O-methylguanosine-3'-phosphate
  modified_base 5: mod_base = OTHER; note = 2'-O-methylguanosine-3'-phosphate
  modified_base 6: mod_base = OTHER; note = 2'-O-methyladenosine-3'-phosphate
  modified_base 7: mod_base = OTHER; note = 2'-O-methylguanosine-3'-phosphate
  modified_base 8: mod_base = OTHER; note = 2'-O-methyladenosine-3'-phosphate
  modified_base 9: mod_base = OTHER; note = 2'-deoxy-2'-fluoroadenosine-3'-phosphate
  modified_base 10: mod_base = OTHER; note = 2'-deoxy-2'-fluoroguanosine-3'-phosphate
  modified_base 11: mod_base = OTHER; note = 2'-deoxy-2'-fluorouridine-3'-phosphate
  modified_base 12: mod_base = OTHER; note = 2'-O-methyluridine-3'-phosphate
  modified_base 13: mod_base = OTHER; note = 2'-O-methylcytidine-3'-phosphate
  modified_base 14: mod_base = OTHER; note = 2'-O-methylguanosine-3'-phosphate
  modified_base 15: mod_base = OTHER; note = 2'-O-methylguanosine-3'-phosphate
  modified_base 16: mod_base = OTHER; note = 2'-O-methylcytidine-3'-phosphate
  modified_base 17: mod_base = OTHER; note = 2'-O-methylcytidine-3'-phosphate
  modified_base 18: mod_base = OTHER; note = 2'-O-methyluridine-3'-phosphate
  modified_base 19: mod_base = OTHER; note = 2'-O-methyladenosine-3'-phosphate
  modified_base 20: mod_base = OTHER; note = 2'-O-methylguanosine-3'-phosphate
  modified_base 21: mod_base = OTHER; note 2'-O-methyladenosine3'-phosphate-N-[tris(GalNAc-alkyl)-amid odecanoyl)]-4-hydroxyprolinol (Hyp-(GalNAc-alkyl)3)
gtgggagaagttcggcctaga

SEQ ID NO: 327 - RNA, 21 nt, synthetic construct
  source 1..21: mol_type = other RNA
  modified_base 1: mod_base = OTHER; note = 2'-O-methyladenosine-3'-phosphorothioate
  modified_base 2: mod_base = OTHER; note = 2'-O-methylguanosine-3'-phosphorothioate
  modified_base 3: mod_base = OTHER; note = 2'-O-methyladenosine-3'-phosphate
  modified_base 4: mod_base = OTHER; note = 2'-O-methylguanosine-3'-phosphate
  modified_base 5: mod_base = OTHER; note = 2'-O-methylcytidine-3'-phosphate
  modified_base 6: mod_base = OTHER; note = 2'-O-methylguanosine-3'-phosphate
  modified_base 7: mod_base = OTHER; note = 2'-O-methylguanosine-3'-phosphate
  modified_base 8: mod_base = OTHER; note = 2'-O-methylguanosine-3'-phosphate
  modified_base 9: mod_base = OTHER; note = 2'-deoxy-2'-fluorouridine-3'-phosphate
  modified_base 10: mod_base = OTHER; note = 2'-deoxy-2'-fluoroadenosine-3'-phosphate
  modified_base 11: mod_base = OTHER; note = 2'-deoxy-2'-fluorocytidine-3'-phosphate
  modified_base 12: mod_base = OTHER; note = 2'-O-methylcytidine-3'-phosphate
  modified_base 13: mod_base = OTHER; note = 2'-O-methyluridine-3'-phosphate
  modified_base 14: mod_base = OTHER; note = 2'-O-methylcytidine-3'-phosphate
  modified_base 15: mod_base = OTHER; note = 2'-O-methyluridine-3'-phosphate
  modified_base 16: mod_base = OTHER; note = 2'-O-methyluridine-3'-phosphate
  modified_base 17: mod_base = OTHER; note = 2'-O-methylcytidine-3'-phosphate
  modified_base 18: mod_base = OTHER; note = 2'-O-methyladenosine-3'-phosphate
  modified_base 19: mod_base = OTHER; note = 2'-O-methyluridine-3'-phosphate
  modified_base 20: mod_base = OTHER; note = 2'-O-methylcytidine-3'-phosphate
  modified_base 21: mod_base = OTHER; note 2'-O-methyladenosine3'-phosphate-N-[tris(GalNAc-alkyl)-amid odecanoyl)]-4-hydroxyprolinol (Hyp-(GalNAc-alkyl)3)
agagcgggtacctcttcatca

SEQ ID NO: 328 - RNA, 21 nt, synthetic construct
  source 1..21: mol_type = other RNA
  modified_base 1: mod_base = OTHER; note = 2'-O-methylcytidine-3'-phosphorothioate
  modified_base 2: mod_base = OTHER; note = 2'-O-methyladenosine-3'-phosphorothioate
  modified_base 3: mod_base = OTHER; note = 2'-O-methyladenosine-3'-phosphate
  modified_base 4: mod_base = OTHER; note = 2'-O-methylguanosine-3'-phosphate
  modified_base 5: mod_base = OTHER; note = 2'-O-methylguanosine-3'-phosphate
  modified_base 6: mod_base = OTHER; note = 2'-O-methyluridine-3'-phosphate
  modified_base 7: mod_base = OTHER; note = 2'-O-methylcytidine-3'-phosphate
  modified_base 8: mod_base = OTHER; note = 2'-O-methyluridine-3'-phosphate
  modified_base 9: mod_base = OTHER; note = 2'-deoxy-2'-fluoroadenosine-3'-phosphate
  modified_base 10: mod_base = OTHER; note = 2'-deoxy-2'-fluorocytidine-3'-phosphate
  modified_base 11: mod_base = OTHER; note = 2'-deoxy-2'-fluoroguanosine-3'-phosphate
  modified_base 12: mod_base = OTHER; note = 2'-O-methylcytidine-3'-phosphate
  modified_base 13: mod_base = OTHER; note = 2'-O-methylcytidine-3'-phosphate
  modified_base 14: mod_base = OTHER; note = 2'-O-methyluridine-3'-phosphate
  modified_base 15: mod_base = OTHER; note = 2'-O-methyladenosine-3'-phosphate
  modified_base 16: mod_base = OTHER; note = 2'-O-methyluridine-3'-phosphate
  modified_base 17: mod_base = OTHER; note = 2'-O-methyluridine-3'-phosphate
  modified_base 18: mod_base = OTHER; note = 2'-O-methyladenosine-3'-phosphate
  modified_base 19: mod_base = OTHER; note = 2'-O-methylcytidine-3'-phosphate
  modified_base 20: mod_base = OTHER; note = 2'-O-methyladenosine-3'-phosphate
  modified_base 21: mod_base = OTHER; note 2'-O-methyluridine-3'-phosphate-N-[tris(GalNAc-alkyl)-amido decanoyl)]-4-hydroxyprolinol (Hyp-(GalNAc-alkyl)3)
caaggtctacgcctattacat

SEQ ID NO: 329 - RNA, 21 nt, synthetic construct
  source 1..21: mol_type = other RNA
  modified_base 1: mod_base = OTHER; note = 2'-O-methylguanosine-3'-phosphorothioate
  modified_base 2: mod_base = OTHER; note = 2'-O-methylcytidine-3'-phosphorothioate
  modified_base 3: mod_base = OTHER; note = 2'-O-methyluridine-3'-phosphate
  modified_base 4: mod_base = OTHER; note = 2'-O-methylguanosine-3'-phosphate
  modified_base 5: mod_base = OTHER; note = 2'-O-methyladenosine-3'-phosphate
  modified_base 6: mod_base = OTHER; note = 2'-O-methylguanosine-3'-phosphate
  modified_base 7: mod_base = OTHER; note = 2'-O-methylguanosine-3'-phosphate
  modified_base 8: mod_base = OTHER; note = 2'-O-methyladenosine-3'-phosphate
  modified_base 9: mod_base = OTHER; note = 2'-deoxy-2'-fluoroguanosine-3'-phosphate
  modified_base 10: mod_base = OTHER; note = 2'-deoxy-2'-fluoroadenosine-3'-phosphate
  modified_base 11: mod_base = OTHER; note = 2'-deoxy-2'-fluoroadenosine-3'-phosphate
  modified_base 12: mod_base = OTHER; note = 2'-O-methyluridine-3'-phosphate
  modified_base 13: mod_base = OTHER; note = 2'-O-methyluridine-3'-phosphate
  modified_base 14: mod_base = OTHER; note = 2'-O-methylguanosine-3'-phosphate
  modified_base 15: mod_base = OTHER; note = 2'-O-methylcytidine-3'-phosphate
  modified_base 16: mod_base = OTHER; note = 2'-O-methyluridine-3'-phosphate
  modified_base 17: mod_base = OTHER; note = 2'-O-methyluridine-3'-phosphate
  modified_base 18: mod_base = OTHER; note = 2'-O-methylcytidine-3'-phosphate
  modified_base 19: mod_base = OTHER; note = 2'-O-methyladenosine-3'-phosphate
  modified_base 20: mod_base = OTHER; note = 2'-O-methyluridine-3'-phosphate
  modified_base 21: mod_base = OTHER; note 2'-O-methyluridine-3'-phosphate-N-[tris(GalNAc-alkyl)-amido decanoyl)]-4-hydroxyprolinol (Hyp-(GalNAc-alkyl)3)
gctgaggagaattgcttcatt

SEQ ID NO: 330 - RNA, 21 nt, synthetic construct
  source 1..21: mol_type = other RNA
  modified_base 1: mod_base = OTHER; note = 2'-O-methylguanosine-3'-phosphorothioate
  modified_base 2: mod_base = OTHER; note = 2'-O-methyluridine-3'-phosphorothioate
  modified_base 3: mod_base = OTHER; note = 2'-O-methyladenosine-3'-phosphate
  modified_base 4: mod_base = OTHER; note = 2'-O-methylcytidine-3'-phosphate
  modified_base 5: mod_base = OTHER; note = 2'-O-methylcytidine-3'-phosphate
  modified_base 6: mod_base = OTHER; note = 2'-O-methyluridine-3'-phosphate
  modified_base 7: mod_base = OTHER; note = 2'-deoxy-2'-fluorocytidine-3'-phosphate
  modified_base 8: mod_base = OTHER; note = 2'-O-methyluridine-3'-phosphate
  modified_base 9: mod_base = OTHER; note = 2'-deoxy-2'-fluorouridine-3'-phosphate
  modified_base 10: mod_base = OTHER; note = 2'-deoxy-2'-fluorocytidine-3'-phosphate
  modified_base 11: mod_base = OTHER; note = 2'-deoxy-2'-fluoroadenosine-3'-phosphate
  modified_base 12: mod_base = OTHER; note = 2'-O-methyluridine-3'-phosphate
  modified_base 13: mod_base = OTHER; note = 2'-O-methylcytidine-3'-phosphate
  modified_base 14: mod_base = OTHER; note = 2'-O-methylcytidine-3'-phosphate
  modified_base 15: mod_base = OTHER; note = 2'-O-methyladenosine-3'-phosphate
  modified_base 16: mod_base = OTHER; note = 2'-O-methylguanosine-3'-phosphate
  modified_base 17: mod_base = OTHER; note = 2'-O-methyladenosine-3'-phosphate
  modified_base 18: mod_base = OTHER; note = 2'-O-methylcytidine-3'-phosphate
  modified_base 19: mod_base = OTHER; note = 2'-O-methyladenosine-3'-phosphate
  modified_base 20: mod_base = OTHER; note = 2'-O-methylguanosine-3'-phosphate
  modified_base 21: mod_base = OTHER; note 2'-O-methyluridine-3'-phosphate-N-[tris(GalNAc-alkyl)-amido decanoyl)]-4-hydroxyprolinol (Hyp-(GalNAc-alkyl)3)
gtacctcttcatccagacagt

SEQ ID NO: 331 - RNA, 21 nt, synthetic construct
  source 1..21: mol_type = other RNA
  modified_base 1: mod_base = OTHER; note = 2'-O-methylguanosine-3'-phosphorothioate
  modified_base 2: mod_base = OTHER; note = 2'-O-methyladenosine-3'-phosphorothioate
  modified_base 3: mod_base = OTHER; note = 2'-O-methylcytidine-3'-phosphate
  modified_base 4: mod_base = OTHER; note = 2'-O-methyladenosine-3'-phosphate
  modified_base 5: mod_base = OTHER; note = 2'-O-methylguanosine-3'-phosphate
  modified_base 6: mod_base = OTHER; note = 2'-O-methyladenosine-3'-phosphate
  modified_base 7: mod_base = OTHER; note = 2'-deoxy-2'-fluorocytidine-3'-phosphate
  modified_base 8: mod_base = OTHER; note = 2'-O-methyladenosine-3'-phosphate
  modified_base 9: mod_base = OTHER; note = 2'-deoxy-2'-fluoroadenosine-3'-phosphate
  modified_base 10: mod_base = OTHER; note = 2'-deoxy-2'-fluoroguanosine-3'-phosphate
  modified_base 11: mod_base = OTHER; note = 2'-deoxy-2'-fluoroadenosine-3'-phosphate
  modified_base 12: mod_base = OTHER; note = 2'-O-methylcytidine-3'-phosphate
  modified_base 13: mod_base = OTHER; note = 2'-O-methylcytidine-3'-phosphate
  modified_base 14: mod_base = OTHER; note = 2'-O-methyladenosine-3'-phosphate
  modified_base 15: mod_base = OTHER; note = 2'-O-methyluridine-3'-phosphate
  modified_base 16: mod_base = OTHER; note = 2'-O-methylcytidine-3'-phosphate
  modified_base 17: mod_base = OTHER; note = 2'-O-methyluridine-3'-phosphate
  modified_base 18: mod_base = OTHER; note = 2'-O-methyladenosine-3'-phosphate
  modified_base 19: mod_base = OTHER; note = 2'-O-methylcytidine-3'-phosphate
  modified_base 20: mod_base = OTHER; note = 2'-O-methyladenosine-3'-phosphate
  modified_base 21: mod_base = OTHER; note 2'-O-methyluridine-3'-phosphate-N-[tris(GalNAc-alkyl)-amido decanoyl)]-4-hydroxyprolinol (Hyp-(GalNAc-alkyl)3)
gacagacaagaccatctacat

SEQ ID NO: 332 - RNA, 21 nt, synthetic construct
  source 1..21: mol_type = other RNA
  modified_base 1: mod_base = OTHER; note = 2'-O-methylcytidine-3'-phosphorothioate
  modified_base 2: mod_base = OTHER; note = 2'-O-methyladenosine-3'-phosphorothioate
  modified_base 3: mod_base = OTHER; note = 2'-O-methyluridine-3'-phosphate
  modified_base 4: mod_base = OTHER; note = 2'-O-methyluridine-3'-phosphate
  modified_base 5: mod_base = OTHER; note = 2'-O-methylguanosine-3'-phosphate
  modified_base 6: mod_base = OTHER; note = 2'-O-methyladenosine-3'-phosphate
  modified_base 7: mod_base = OTHER; note = 2'-deoxy-2'-fluoroguanosine-3'-phosphate
  modified_base 8: mod_base = OTHER; note = 2'-O-methyladenosine-3'-phosphate
  modified_base 9: mod_base = OTHER; note = 2'-deoxy-2'-fluoroadenosine-3'-phosphate
  modified_base 10: mod_base = OTHER; note = 2'-deoxy-2'-fluorocytidine-3'-phosphate
  modified_base 11: mod_base = OTHER; note = 2'-deoxy-2'-fluorocytidine-3'-phosphate
  modified_base 12: mod_base = OTHER; note = 2'-O-methylcytidine-3'-phosphate
  modified_base 13: mod_base = OTHER; note = 2'-O-methylguanosine-3'-phosphate
  modified_base 14: mod_base = OTHER; note = 2'-O-methylguanosine-3'-phosphate
  modified_base 15: mod_base = OTHER; note = 2'-O-methyladenosine-3'-phosphate
  modified_base 16: mod_base = OTHER; note = 2'-O-methyladenosine-3'-phosphate
  modified_base 17: mod_base = OTHER; note = 2'-O-methylguanosine-3'-phosphate
  modified_base 18: mod_base = OTHER; note = 2'-O-methylguanosine-3'-phosphate
  modified_base 19: mod_base = OTHER; note = 2'-O-methylcytidine-3'-phosphate
  modified_base 20: mod_base = OTHER; note = 2'-O-methyladenosine-3'-phosphate
  modified_base 21: mod_base = OTHER; note 2'-O-methyluridine-3'-phosphate-N-[tris(GalNAc-alkyl)-amido decanoyl)]-4-hydroxyprolinol (Hyp-(GalNAc-alkyl)3)
cattgagaacccggaaggcat

SEQ ID NO: 333 - RNA, 21 nt, synthetic construct
  source 1..21: mol_type = other RNA
  modified_base 1: mod_base = OTHER; note = 2'-O-methylcytidine-3'-phosphorothioate
  modified_base 2: mod_base = OTHER; note = 2'-O-methyladenosine-3'-phosphorothioate
  modified_base 3: mod_base = OTHER; note = 2'-O-methylguanosine-3'-phosphate
  modified_base 4: mod_base = OTHER; note = 2'-O-methyladenosine-3'-phosphate
  modified_base 5: mod_base = OTHER; note = 2'-O-methylguanosine-3'-phosphate
  modified_base 6: mod_base = OTHER; note = 2'-O-methyladenosine-3'-phosphate
  modified_base 7: mod_base = OTHER; note = 2'-deoxy-2'-fluoroadenosine-3'-phosphate
  modified_base 8: mod_base = OTHER; note = 2'-O-methyladenosine-3'-phosphate
  modified_base 9: mod_base = OTHER; note = 2'-deoxy-2'-fluorouridine-3'-phosphate
  modified_base 10: mod_base = OTHER; note = 2'-deoxy-2'-fluorouridine-3'-phosphate
  modified_base 11: mod_base = OTHER; note = 2'-deoxy-2'-fluorocytidine-3'-phosphate
  modified_base 12: mod_base = OTHER; note = 2'-O-methyluridine-3'-phosphate
  modified_base 13: mod_base = OTHER; note = 2'-O-methyladenosine-3'-phosphate
  modified_base 14: mod_base = OTHER; note = 2'-O-methylcytidine-3'-phosphate
  modified_base 15: mod_base = OTHER; note = 2'-O-methyluridine-3'-phosphate
  modified_base 16: mod_base = OTHER; note = 2'-O-methyladenosine-3'-phosphate
  modified_base 17: mod_base = OTHER; note = 2'-O-methylcytidine-3'-phosphate
  modified_base 18: mod_base = OTHER; note = 2'-O-methyladenosine-3'-phosphate
  modified_base 19: mod_base = OTHER; note = 2'-O-methyluridine-3'-phosphate
  modified_base 20: mod_base = OTHER; note = 2'-O-methylcytidine-3'-phosphate
  modified_base 21: mod_base = OTHER; note 2'-O-methyluridine-3'-phosphate-N-[tris(GalNAc-alkyl)-amido decanoyl)]-4-hydroxyprolinol (Hyp-(GalNAc-alkyl)3)
cagagaaattctactacatct

SEQ ID NO: 334 - RNA, 21 nt, synthetic construct
  source 1..21: mol_type = other RNA
  modified_base 1: mod_base = OTHER; note = 2'-O-methylguanosine-3'-phosphorothioate
  modified_base 2: mod_base = OTHER; note = 2'-O-methyladenosine-3'-phosphorothioate
  modified_base 3: mod_base = OTHER; note = 2'-O-methylguanosine-3'-phosphate
  modified_base 4: mod_base = OTHER; note = 2'-O-methyladenosine-3'-phosphate
  modified_base 5: mod_base = OTHER; note = 2'-O-methyladenosine-3'-phosphate
  modified_base 6: mod_base = OTHER; note = 2'-O-methyladenosine-3'-phosphate
  modified_base 7: mod_base = OTHER; note = 2'-deoxy-2'-fluorouridine-3'-phosphate
  modified_base 8: mod_base = OTHER; note = 2'-O-methyluridine-3'-phosphate
  modified_base 9: mod_base = OTHER; note = 2'-deoxy-2'-fluorocytidine-3'-phosphate
  modified_base 10: mod_base = OTHER; note = 2'-deoxy-2'-fluorouridine-3'-phosphate
  modified_base 11: mod_base = OTHER; note = 2'-deoxy-2'-fluoroadenosine-3'-phosphate
  modified_base 12: mod_base = OTHER; note = 2'-O-methylcytidine-3'-phosphate
  modified_base 13: mod_base = OTHER; note = 2'-O-methyluridine-3'-phosphate
  modified_base 14: mod_base = OTHER; note = 2'-O-methyladenosine-3'-phosphate
  modified_base 15: mod_base = OTHER; note = 2'-O-methylcytidine-3'-phosphate
  modified_base 16: mod_base = OTHER; note = 2'-O-methyladenosine-3'-phosphate
  modified_base 17: mod_base = OTHER; note = 2'-O-methyluridine-3'-phosphate
  modified_base 18: mod_base = OTHER; note = 2'-O-methylcytidine-3'-phosphate
  modified_base 19: mod_base = OTHER; note = 2'-O-methyluridine-3'-phosphate
  modified_base 20: mod_base = OTHER; note = 2'-O-methyladenosine-3'-phosphate
  modified_base 21: mod_base = OTHER; note 2'-O-methyluridine-3'-phosphate-N-[tris(GalNAc-alkyl)-amido decanoyl)]-4-hydroxyprolinol (Hyp-(GalNAc-alkyl)3)
gagaaattctactacatctat

SEQ ID NO: 335 - RNA, 21 nt, synthetic construct
  source 1..21: mol_type = other RNA
  modified_base 1: mod_base = OTHER; note = 2'-O-methyladenosine-3'-phosphorothioate
  modified_base 2: mod_base = OTHER; note = 2'-O-methylguanosine-3'-phosphorothioate
  modified_base 3: mod_base = OTHER; note = 2'-O-methyladenosine-3'-phosphate
  modified_base 4: mod_base = OTHER; note = 2'-O-methyladenosine-3'-phosphate
  modified_base 5: mod_base = OTHER; note = 2'-O-methyladenosine-3'-phosphate
  modified_base 6: mod_base = OTHER; note = 2'-O-methyluridine-3'-phosphate
  modified_base 7: mod_base = OTHER; note = 2'-deoxy-2'-fluorouridine-3'-phosphate
  modified_base 8: mod_base = OTHER; note = 2'-O-methylcytidine-3'-phosphate
  modified_base 9: mod_base = OTHER; note = 2'-deoxy-2'-fluorouridine-3'-phosphate
  modified_base 10: mod_base = OTHER; note = 2'-deoxy-2'-fluoroadenosine-3'-phosphate
  modified_base 11: mod_base = OTHER; note = 2'-deoxy-2'-fluorocytidine-3'-phosphate
  modified_base 12: mod_base = OTHER; note = 2'-O-methyluridine-3'-phosphate
  modified_base 13: mod_base = OTHER; note = 2'-O-methyladenosine-3'-phosphate
  modified_base 14: mod_base = OTHER; note = 2'-O-methylcytidine-3'-phosphate
  modified_base 15: mod_base = OTHER; note = 2'-O-methyladenosine-3'-phosphate
  modified_base 16: mod_base = OTHER; note = 2'-O-methyluridine-3'-phosphate
  modified_base 17: mod_base = OTHER; note = 2'-O-methylcytidine-3'-phosphate
  modified_base 18: mod_base = OTHER; note = 2'-O-methyluridine-3'-phosphate
  modified_base 19: mod_base = OTHER; note = 2'-O-methyladenosine-3'-phosphate
  modified_base 20: mod_base = OTHER; note = 2'-O-methyluridine-3'-phosphate
  modified_base 21: mod_base = OTHER; note 2'-O-methyluridine-3'-phosphate-N-[tris(GalNAc-alkyl)-amido decanoyl)]-4-hydroxyprolinol (Hyp-(GalNAc-alkyl)3)
agaaattctactacatctatt

SEQ ID NO: 336 - RNA, 21 nt, synthetic construct
  source 1..21: mol_type = other RNA
  modified_base 1: mod_base = OTHER; note = 2'-O-methylguanosine-3'-phosphorothioate
  modified_base 2: mod_base = OTHER; note = 2'-O-methylcytidine-3'-phosphorothioate
  modified_base 3: mod_base = OTHER; note = 2'-O-methyladenosine-3'-phosphate
  modified_base 4: mod_base = OTHER; note = 2'-O-methylguanosine-3'-phosphate
  modified_base 5: mod_base = OTHER; note = 2'-O-methylguanosine-3'-phosphate
  modified_base 6: mod_base = OTHER; note = 2'-O-methylcytidine-3'-phosphate
  modified_base 7: mod_base = OTHER; note = 2'-deoxy-2'-fluoroadenosine-3'-phosphate
  modified_base 8: mod_base = OTHER; note = 2'-O-methylguanosine-3'-phosphate
  modified_base 9: mod_base = OTHER; note = 2'-deoxy-2'-fluoroadenosine-3'-phosphate
  modified_base 10: mod_base = OTHER; note = 2'-deoxy-2'-fluoroguanosine-3'-phosphate
  modified_base 11: mod_base = OTHER; note = 2'-deoxy-2'-fluorocytidine-3'-phosphate
  modified_base 12: mod_base = OTHER; note = 2'-O-methylguanosine-3'-phosphate
  modified_base 13: mod_base = OTHER; note = 2'-O-methylcytidine-3'-phosphate
  modified_base 14: mod_base = OTHER; note = 2'-O-methyladenosine-3'-phosphate
  modified_base 15: mod_base = OTHER; note = 2'-O-methylguanosine-3'-phosphate
  modified_base 16: mod_base = OTHER; note = 2'-O-methylcytidine-3'-phosphate
  modified_base 17: mod_base = OTHER; note = 2'-O-methylguanosine-3'-phosphate
  modified_base 18: mod_base = OTHER; note = 2'-O-methylguanosine-3'-phosphate
  modified_base 19: mod_base = OTHER; note = 2'-O-methylguanosine-3'-phosphate
  modified_base 20: mod_base = OTHER; note = 2'-O-methyladenosine-3'-phosphate
  modified_base 21: mod_base = OTHER; note 2'-O-methyluridine-3'-phosphate-N-[tris(GalNAc-alkyl)-amido decanoyl)]-4-hydroxyprolinol (Hyp-(GalNAc-alkyl)3)
gcaggcagagcgcagcgggat

SEQ ID NO: 337 - RNA, 21 nt, synthetic construct
  source 1..21: mol_type = other RNA
  modified_base 1: mod_base = OTHER; note = 2'-O-methylcytidine-3'-phosphorothioate
  modified_base 2: mod_base = OTHER; note = 2'-O-methylcytidine-3'-phosphorothioate
  modified_base 3: mod_base = OTHER; note = 2'-O-methyladenosine-3'-phosphate
  modified_base 4: mod_base = OTHER; note = 2'-O-methylguanosine-3'-phosphate
  modified_base 5: mod_base = OTHER; note = 2'-O-methyladenosine-3'-phosphate
  modified_base 6: mod_base = OTHER; note = 2'-O-methyluridine-3'-phosphate
  modified_base 7: mod_base = OTHER; note = 2'-deoxy-2'-fluorocytidine-3'-phosphate
  modified_base 8: mod_base = OTHER; note = 2'-O-methylcytidine-3'-phosphate
  modified_base 9: mod_base = OTHER; note = 2'-deoxy-2'-fluoroadenosine-3'-phosphate
  modified_base 10: mod_base = OTHER; note = 2'-deoxy-2'-fluorocytidine-3'-phosphate
  modified_base 11: mod_base = OTHER; note = 2'-deoxy-2'-fluorouridine-3'-phosphate
  modified_base 12: mod_base = OTHER; note = 2'-O-methyluridine-3'-phosphate
  modified_base 13: mod_base = OTHER; note = 2'-O-methylcytidine-3'-phosphate
  modified_base 14: mod_base = OTHER; note = 2'-O-methyladenosine-3'-phosphate
  modified_base 15: mod_base = OTHER; note = 2'-O-methylcytidine-3'-phosphate
  modified_base 16: mod_base = OTHER; note = 2'-O-methylcytidine-3'-phosphate
  modified_base 17: mod_base = OTHER; note = 2'-O-methyladenosine-3'-phosphate
  modified_base 18: mod_base = OTHER; note = 2'-O-methyladenosine-3'-phosphate
  modified_base 19: mod_base = OTHER; note = 2'-O-methylguanosine-3'-phosphate
  modified_base 20: mod_base = OTHER; note = 2'-O-methyladenosine-3'-phosphate
  modified_base 21: mod_base = OTHER; note 2'-O-methyluridine-3'-phosphate-N-[tris(GalNAc-alkyl)-amido decanoyl)]-4-hydroxyprolinol (Hyp-(GalNAc-alkyl)3)
ccagatccacttcaccaagat

SEQ ID NO: 338 - RNA, 21 nt, synthetic construct
  source 1..21: mol_type = other RNA
  modified_base 1: mod_base = OTHER; note = 2'-O-methyluridine-3'-phosphorothioate
  modified_base 2: mod_base = OTHER; note = 2'-O-methylguanosine-3'-phosphorothioate
  modified_base 3: mod_base = OTHER; note = 2'-O-methylguanosine-3'-phosphate
  modified_base 4: mod_base = OTHER; note = 2'-O-methylguanosine-3'-phosphate
  modified_base 5: mod_base = OTHER; note = 2'-O-methylcytidine-3'-phosphate
  modified_base 6: mod_base = OTHER; note = 2'-O-methyladenosine-3'-phosphate
  modified_base 7: mod_base = OTHER; note = 2'-deoxy-2'-fluoroadenosine-3'-phosphate
  modified_base 8: mod_base = OTHER; note = 2'-O-methylcytidine-3'-phosphate
  modified_base 9: mod_base = OTHER; note = 2'-deoxy-2'-fluorouridine-3'-phosphate
  modified_base 10: mod_base = OTHER; note = 2'-deoxy-2'-fluorocytidine-3'-phosphate
  modified_base 11: mod_base = OTHER; note = 2'-deoxy-2'-fluorocytidine-3'-phosphate
  modified_base 12: mod_base = OTHER; note = 2'-O-methyladenosine-3'-phosphate
  modified_base 13: mod_base = OTHER; note = 2'-O-methyladenosine-3'-phosphate
  modified_base 14: mod_base = OTHER; note = 2'-O-methylcytidine-3'-phosphate
  modified_base 15: mod_base = OTHER; note = 2'-O-methyladenosine-3'-phosphate
  modified_base 16: mod_base = OTHER; note = 2'-O-methyladenosine-3'-phosphate
  modified_base 17: mod_base = OTHER; note = 2'-O-methyluridine-3'-phosphate
  modified_base 18: mod_base = OTHER; note = 2'-O-methyluridine-3'-phosphate
  modified_base 19: mod_base = OTHER; note = 2'-O-methyladenosine-3'-phosphate
  modified_base 20: mod_base = OTHER; note = 2'-O-methylcytidine-3'-phosphate
  modified_base 21: mod_base = OTHER; note 2'-O-methyluridine-3'-phosphate-N-[tris(GalNAc-alkyl)-amido decanoyl)]-4-hydroxyprolinol (Hyp-(GalNAc-alkyl)3)
tgggcaactccaacaattact

SEQ ID NO: 339 - RNA, 21 nt, synthetic construct
  source 1..21: mol_type = other RNA
  modified_base 1: mod_base = OTHER; note = 2'-O-methyluridine-3'-phosphorothioate
  modified_base 2: mod_base = OTHER; note = 2'-O-methylguanosine-3'-phosphorothioate
  modified_base 3: mod_base = OTHER; note = 2'-O-methyluridine-3'-phosphate
  modified_base 4: mod_base = OTHER; note = 2'-O-methyluridine-3'-phosphate
  modified_base 5: mod_base = OTHER; note = 2'-O-methylcytidine-3'-phosphate
  modified_base 6: mod_base = OTHER; note = 2'-O-methylguanosine-3'-phosphate
  modified_base 7: mod_base = OTHER; note = 2'-deoxy-2'-fluorouridine-3'-phosphate
  modified_base 8: mod_base = OTHER; note = 2'-O-methylguanosine-3'-phosphate
  modified_base 9: mod_base = OTHER; note = 2'-deoxy-2'-fluorocytidine-3'-phosphate
  modified_base 10: mod_base = OTHER; note = 2'-deoxy-2'-fluorouridine-3'-phosphate
  modified_base 11: mod_base = OTHER; note = 2'-deoxy-2'-fluoroguanosine-3'-phosphate
  modified_base 12: mod_base = OTHER; note = 2'-O-methyladenosine-3'-phosphate
  modified_base 13: mod_base = OTHER; note = 2'-O-methyladenosine-3'-phosphate
  modified_base 14: mod_base = OTHER; note = 2'-O-methyluridine-3'-phosphate
  modified_base 15: mod_base = OTHER; note = 2'-O-methyladenosine-3'-phosphate
  modified_base 16: mod_base = OTHER; note = 2'-O-methyladenosine-3'-phosphate
  modified_base 17: mod_base = OTHER; note = 2'-O-methylguanosine-3'-phosphate
  modified_base 18: mod_base = OTHER; note = 2'-O-methyladenosine-3'-phosphate
  modified_base 19: mod_base = OTHER; note = 2'-O-methyladenosine-3'-phosphate
  modified_base 20: mod_base = OTHER; note = 2'-O-methylguanosine-3'-phosphate
  modified_base 21: mod_base = OTHER; note 2'-O-methyluridine-3'-phosphate-N-[tris(GalNAc-alkyl)-amido decanoyl)]-4-hydroxyprolinol (Hyp-(GalNAc-alkyl)3)
tgttcgtgctgaataagaagt

SEQ ID NO: 340 - RNA, 21 nt, synthetic construct
  source 1..21: mol_type = other RNA
  modified_base 1: mod_base = OTHER; note = 2'-O-methyluridine-3'-phosphorothioate
  modified_base 2: mod_base = OTHER; note = 2'-O-methyluridine-3'-phosphorothioate
  modified_base 3: mod_base = OTHER; note = 2'-O-methylcytidine-3'-phosphate
  modified_base 4: mod_base = OTHER; note = 2'-O-methylguanosine-3'-phosphate
  modified_base 5: mod_base = OTHER; note = 2'-O-methyluridine-3'-phosphate
  modified_base 6: mod_base = OTHER; note = 2'-O-methylguanosine-3'-phosphate
  modified_base 7: mod_base = OTHER; note = 2'-deoxy-2'-fluorocytidine-3'-phosphate
  modified_base 8: mod_base = OTHER; note = 2'-O-methyluridine-3'-phosphate
  modified_base 9: mod_base = OTHER; note = 2'-deoxy-2'-fluoroguanosine-3'-phosphate
  modified_base 10: mod_base = OTHER; note = 2'-deoxy-2'-fluoroadenosine-3'-phosphate
  modified_base 11: mod_base = OTHER; note = 2'-deoxy-2'-fluoroadenosine-3'-phosphate
  modified_base 12: mod_base = OTHER; note = 2'-O-methyluridine-3'-phosphate
  modified_base 13: mod_base = OTHER; note = 2'-O-methyladenosine-3'-phosphate
  modified_base 14: mod_base = OTHER; note = 2'-O-methyladenosine-3'-phosphate
  modified_base 15: mod_base = OTHER; note = 2'-O-methylguanosine-3'-phosphate
  modified_base 16: mod_base = OTHER; note = 2'-O-methyladenosine-3'-phosphate
  modified_base 17: mod_base = OTHER; note = 2'-O-methyladenosine-3'-phosphate
  modified_base 18: mod_base = OTHER; note = 2'-O-methylguanosine-3'-phosphate
  modified_base 19: mod_base = OTHER; note = 2'-O-methyladenosine-3'-phosphate
  modified_base 20: mod_base = OTHER; note = 2'-O-methyladenosine-3'-phosphate
  modified_base 21: mod_base = OTHER; note 2'-O-methyluridine-3'-phosphate-N-[tris(GalNAc-alkyl)-amido decanoyl)]-4-hydroxyprolinol (Hyp-(GalNAc-alkyl)3)
ttcgtgctgaataagaagaat

SEQ ID NO: 341 - RNA, 21 nt, synthetic construct
  source 1..21: mol_type = other RNA
  modified_base 1: mod_base = OTHER; note = 2'-O-methylguanosine-3'-phosphorothioate
  modified_base 2: mod_base = OTHER; note = 2'-O-methyluridine-3'-phosphorothioate
  modified_base 3: mod_base = OTHER; note = 2'-O-methyladenosine-3'-phosphate
  modified_base 4: mod_base = OTHER; note = 2'-O-methyladenosine-3'-phosphate
  modified_base 5: mod_base = OTHER; note = 2'-O-methyluridine-3'-phosphate
  modified_base 6: mod_base = OTHER; note = 2'-O-methylguanosine-3'-phosphate
  modified_base 7: mod_base = OTHER; note = 2'-deoxy-2'-fluorocytidine-3'-phosphate
  modified_base 8: mod_base = OTHER; note = 2'-O-methyladenosine-3'-phosphate
  modified_base 9: mod_base = OTHER; note = 2'-deoxy-2'-fluoroguanosine-3'-phosphate
  modified_base 10: mod_base = OTHER; note = 2'-deoxy-2'-fluoroguanosine-3'-phosphate
  modified_base 11: mod_base = OTHER; note = 2'-deoxy-2'-fluoroadenosine-3'-phosphate
  modified_base 12: mod_base = OTHER; note = 2'-O-methylcytidine-3'-phosphate
  modified_base 13: mod_base = OTHER; note = 2'-O-methyluridine-3'-phosphate
  modified_base 14: mod_base = OTHER; note = 2'-O-methyluridine-3'-phosphate
  modified_base 15: mod_base = OTHER; note = 2'-O-methylcytidine-3'-phosphate
  modified_base 16: mod_base = OTHER; note = 2'-O-methyluridine-3'-phosphate
  modified_base 17: mod_base = OTHER; note = 2'-O-methyluridine-3'-phosphate
  modified_base 18: mod_base = OTHER; note = 2'-O-methylcytidine-3'-phosphate
  modified_base 19: mod_base = OTHER; note = 2'-O-methyladenosine-3'-phosphate
  modified_base 20: mod_base = OTHER; note = 2'-O-methyluridine-3'-phosphate
  modified_base 21: mod_base = OTHER; note 2'-O-methyluridine-3'-phosphate-N-[tris(GalNAc-alkyl)-amido decanoyl)]-4-hydroxyprolinol (Hyp-(GalNAc-alkyl)3)
gtaatgcaggacttcttcatt

SEQ ID NO: 342 - RNA, 21 nt, synthetic construct
  source 1..21: mol_type = other RNA
  modified_base 1: mod_base = OTHER; note = 2'-O-methylcytidine-3'-phosphorothioate
  modified_base 2: mod_base = OTHER; note = 2'-O-methylcytidine-3'-phosphorothioate
  modified_base 3: mod_base = OTHER; note = 2'-O-methylguanosine-3'-phosphate
  modified_base 4: mod_base = OTHER; note = 2'-O-methyladenosine-3'-phosphate
  modified_base 5: mod_base = OTHER; note = 2'-O-methylguanosine-3'-phosphate
  modified_base 6: mod_base = OTHER; note = 2'-O-methylcytidine-3'-phosphate
  modified_base 7: mod_base = OTHER; note = 2'-deoxy-2'-fluorocytidine-3'-phosphate
  modified_base 8: mod_base = OTHER; note = 2'-O-methylguanosine-3'-phosphate
  modified_base 9: mod_base = OTHER; note = 2'-deoxy-2'-fluorouridine-3'-phosphate
  modified_base 10: mod_base = OTHER; note = 2'-deoxy-2'-fluorouridine-3'-phosphate
  modified_base 11: mod_base = OTHER; note = 2'-deoxy-2'-fluorocytidine-3'-phosphate
  modified_base 12: mod_base = OTHER; note = 2'-O-methyluridine-3'-phosphate
  modified_base 13: mod_base = OTHER; note = 2'-O-methylcytidine-3'-phosphate
  modified_base 14: mod_base = OTHER; note = 2'-O-methyluridine-3'-phosphate
  modified_base 15: mod_base = OTHER; note = 2'-O-methyladenosine-3'-phosphate
  modified_base 16: mod_base = OTHER; note = 2'-O-methylcytidine-3'-phosphate
  modified_base 17: mod_base = OTHER; note = 2'-O-methyladenosine-3'-phosphate
  modified_base 18: mod_base = OTHER; note = 2'-O-methyladenosine-3'-phosphate
  modified_base 19: mod_base = OTHER; note = 2'-O-methyluridine-3'-phosphate
  modified_base 20: mod_base = OTHER; note = 2'-O-methyluridine-3'-phosphate
  modified_base 21: mod_base = OTHER; note 2'-O-methyluridine-3'-phosphate-N-[tris(GalNAc-alkyl)-amido decanoyl)]-4-hydroxyprolinol (Hyp-(GalNAc-alkyl)3)
ccgagccgttctctacaattt

SEQ ID NO: 343 - RNA, 21 nt, synthetic construct
  source 1..21: mol_type = other RNA
  modified_base 1: mod_base = OTHER; note = 2'-O-methyladenosine-3'-phosphorothioate
  modified_base 2: mod_base = OTHER; note = 2'-O-methylcytidine-3'-phosphorothioate
  modified_base 3: mod_base = OTHER; note = 2'-O-methyluridine-3'-phosphate
  modified_base 4: mod_base = OTHER; note = 2'-O-methyladenosine-3'-phosphate
  modified_base 5: mod_base = OTHER; note = 2'-O-methylcytidine-3'-phosphate
  modified_base 6: mod_base = OTHER; note = 2'-O-methyladenosine-3'-phosphate
  modified_base 7: mod_base = OTHER; note = 2'-deoxy-2'-fluorouridine-3'-phosphate
  modified_base 8: mod_base = OTHER; note = 2'-O-methylguanosine-3'-phosphate
  modified_base 9: mod_base = OTHER; note = 2'-deoxy-2'-fluoroadenosine-3'-phosphate
  modified_base 10: mod_base = OTHER; note = 2'-deoxy-2'-fluoroadenosine-3'-phosphate
  modified_base 11: mod_base = OTHER; note = 2'-deoxy-2'-fluorocytidine-3'-phosphate
  modified_base 12: mod_base = OTHER; note = 2'-O-methylcytidine-3'-phosphate
  modified_base 13: mod_base = OTHER; note = 2'-O-methyluridine-3'-phosphate
  modified_base 14: mod_base = OTHER; note = 2'-O-methyladenosine-3'-phosphate
  modified_base 15: mod_base = OTHER; note = 2'-O-methylcytidine-3'-phosphate
  modified_base 16: mod_base = OTHER; note = 2'-O-methyladenosine-3'-phosphate
  modified_base 17: mod_base = OTHER; note = 2'-O-methylguanosine-3'-phosphate
  modified_base 18: mod_base = OTHER; note = 2'-O-methyladenosine-3'-phosphate
  modified_base 19: mod_base = OTHER; note = 2'-O-methylguanosine-3'-phosphate
  modified_base 20: mod_base = OTHER; note = 2'-O-methyladenosine-3'-phosphate
  modified_base 21: mod_base = OTHER; note 2'-O-methyluridine-3'-phosphate-N-[tris(GalNAc-alkyl)-amido decanoyl)]-4-hydroxyprolinol (Hyp-(GalNAc-alkyl)3)
actacatgaacctacagagat

SEQ ID NO: 344 - RNA, 21 nt, synthetic construct
  source 1..21: mol_type = other RNA
  modified_base 1: mod_base = OTHER; note = 2'-O-methylguanosine-3'-phosphorothioate
  modified_base 2: mod_base = OTHER; note = 2'-O-methylcytidine-3'-phosphorothioate
  modified_base 3: mod_base = OTHER; note = 2'-O-methylcytidine-3'-phosphate
  modified_base 4: mod_base = OTHER; note = 2'-O-methyluridine-3'-phosphate
  modified_base 5: mod_base = OTHER; note = 2'-O-methylcytidine-3'-phosphate
  modified_base 6: mod_base = OTHER; note = 2'-O-methyluridine-3'-phosphate
  modified_base 7: mod_base = OTHER; note = 2'-deoxy-2'-fluorouridine-3'-phosphate
  modified_base 8: mod_base = OTHER; note = 2'-O-methylcytidine-3'-phosphate
  modified_base 9: mod_base = OTHER; note = 2'-deoxy-2'-fluorouridine-3'-phosphate
  modified_base 10: mod_base = OTHER; note = 2'-deoxy-2'-fluorouridine-3'-phosphate
  modified_base 11: mod_base = OTHER; note = 2'-deoxy-2'-fluoroadenosine-3'-phosphate
  modified_base 12: mod_base = OTHER; note = 2'-O-methyladenosine-3'-phosphate
  modified_base 13: mod_base = OTHER; note = 2'-O-methylcytidine-3'-phosphate
  modified_base 14: mod_base = OTHER; note = 2'-O-methyladenosine-3'-phosphate
  modified_base 15: mod_base = OTHER; note = 2'-O-methyladenosine-3'-phosphate
  modified_base 16: mod_base = OTHER; note = 2'-O-methyladenosine-3'-phosphate
  modified_base 17: mod_base = OTHER; note = 2'-O-methyluridine-3'-phosphate
  modified_base 18: mod_base = OTHER; note = 2'-O-methyluridine-3'-phosphate
  modified_base 19: mod_base = OTHER; note = 2'-O-methyluridine-3'-phosphate
  modified_base 20: mod_base = OTHER; note = 2'-O-methylcytidine-3'-phosphate
  modified_base 21: mod_base = OTHER; note 2'-O-methyluridine-3'-phosphate-N-[tris(GalNAc-alkyl)-amido decanoyl)]-4-hydroxyprolinol (Hyp-(GalNAc-alkyl)3)
gcctcttcttaacaaatttct

SEQ ID NO: 345 - RNA, 21 nt, synthetic construct
  source 1..21: mol_type = other RNA
  modified_base 1: mod_base = OTHER; note = 2'-O-methylcytidine-3'-phosphorothioate
  modified_base 2: mod_base = OTHER; note = 2'-O-methylcytidine-3'-phosphorothioate
  modified_base 3: mod_base = OTHER; note = 2'-O-methyladenosine-3'-phosphate
  modified_base 4: mod_base = OTHER; note = 2'-O-methylcytidine-3'-phosphate
  modified_base 5: mod_base = OTHER; note = 2'-O-methyladenosine-3'-phosphate
  modified_base 6: mod_base = OTHER; note = 2'-O-methylguanosine-3'-phosphate
  modified_base 7: mod_base = OTHER; note = 2'-deoxy-2'-fluorocytidine-3'-phosphate
  modified_base 8: mod_base = OTHER; note = 2'-O-methylcytidine-3'-phosphate
  modified_base 9: mod_base = OTHER; note = 2'-deoxy-2'-fluoroadenosine-3'-phosphate
  modified_base 10: mod_base = OTHER; note = 2'-deoxy-2'-fluoroadenosine-3'-phosphate
  modified_base 11: mod_base = OTHER; note = 2'-deoxy-2'-fluoroadenosine-3'-phosphate
  modified_base 12: mod_base = OTHER; note = 2'-O-methylguanosine-3'-phosphate
  modified_base 13: mod_base = OTHER; note = 2'-O-methyladenosine-3'-phosphate
  modified_base 14: mod_base = OTHER; note = 2'-O-methyluridine-3'-phosphate
  modified_base 15: mod_base = OTHER; note = 2'-O-methyladenosine-3'-phosphate
  modified_base 16: mod_base = OTHER; note = 2'-O-methyladenosine-3'-phosphate
  modified_base 17: mod_base = OTHER; note = 2'-O-methylguanosine-3'-phosphate
  modified_base 18: mod_base = OTHER; note = 2'-O-methyladenosine-3'-phosphate
  modified_base 19: mod_base = OTHER; note = 2'-O-methyladenosine-3'-phosphate
  modified_base 20: mod_base = OTHER; note = 2'-O-methylcytidine-3'-phosphate
  modified_base 21: mod_base = OTHER; note 2'-O-methyluridine-3'-phosphate-N-[tris(GalNAc-alkyl)-amido decanoyl)]-4-hydroxyprolinol (Hyp-(GalNAc-alkyl)3)
ccacagccaaagataagaact

SEQ ID NO: 346 - RNA, 21 nt, synthetic construct
  source 1..21: mol_type = other RNA
  modified_base 1: mod_base = OTHER; note = 2'-O-methylcytidine-3'-phosphorothioate
  modified_base 2: mod_base = OTHER; note = 2'-O-methyluridine-3'-phosphorothioate
  modified_base 3: mod_base = OTHER; note = 2'-O-methyladenosine-3'-phosphate
  modified_base 4: mod_base = OTHER; note = 2'-O-methylcytidine-3'-phosphate
  modified_base 5: mod_base = OTHER; note = 2'-O-methyluridine-3'-phosphate
  modified_base 6: mod_base = OTHER; note = 2'-O-methylguanosine-3'-phosphate
  modified_base 7: mod_base = OTHER; note = 2'-deoxy-2'-fluorocytidine-3'-phosphate
  modified_base 8: mod_base = OTHER; note = 2'-O-methyladenosine-3'-phosphate
  modified_base 9: mod_base = OTHER; note = 2'-deoxy-2'-fluoroguanosine-3'-phosphate
  modified_base 10: mod_base = OTHER; note = 2'-deoxy-2'-fluorocytidine-3'-phosphate
  modified_base 11: mod_base = OTHER; note = 2'-deoxy-2'-fluorouridine-3'-phosphate
  modified_base 12: mod_base = OTHER; note = 2'-O-methyladenosine-3'-phosphate
  modified_base 13: mod_base = OTHER; note = 2'-O-methyladenosine-3'-phosphate
  modified_base 14: mod_base = OTHER; note = 2'-O-methyladenosine-3'-phosphate
  modified_base 15: mod_base = OTHER; note = 2'-O-methyladenosine-3'-phosphate
  modified_base 16: mod_base = OTHER; note = 2'-O-methylguanosine-3'-phosphate
  modified_base 17: mod_base = OTHER; note = 2'-O-methyladenosine-3'-phosphate
  modified_base 18: mod_base = OTHER; note = 2'-O-methylcytidine-3'-phosphate
  modified_base 19: mod_base = OTHER; note = 2'-O-methyluridine-3'-phosphate
  modified_base 20: mod_base = OTHER; note = 2'-O-methyluridine-3'-phosphate
  modified_base 21: mod_base = OTHER; note 2'-O-methyluridine-3'-phosphate-N-[tris(GalNAc-alkyl)-amido decanoyl)]-4-hydroxyprolinol (Hyp-(GalNAc-alkyl)3)
ctactgcagctaaaagacttt

SEQ ID NO: 347 - RNA, 21 nt, synthetic construct
  source 1..21: mol_type = other RNA
  modified_base 1: mod_base = OTHER; note = 2'-O-methylcytidine-3'-phosphorothioate
  modified_base 2: mod_base = OTHER; note = 2'-O-methylcytidine-3'-phosphorothioate
  modified_base 3: mod_base = OTHER; note = 2'-O-methylcytidine-3'-phosphate
  modified_base 4: mod_base = OTHER; note = 2'-O-methylguanosine-3'-phosphate
  modified_base 5: mod_base = OTHER; note = 2'-O-methyluridine-3'-phosphate
  modified_base 6: mod_base = OTHER; note = 2'-O-methylcytidine-3'-phosphate
  modified_base 7: mod_base = OTHER; note = 2'-deoxy-2'-fluoroguanosine-3'-phosphate
  modified_base 8: mod_base = OTHER; note = 2'-O-methyluridine-3'-phosphate
  modified_base 9: mod_base = OTHER; note = 2'-deoxy-2'-fluoroguanosine-3'-phosphate
  modified_base 10: mod_base = OTHER; note = 2'-deoxy-2'-fluorocytidine-3'-phosphate
  modified_base 11: mod_base = OTHER; note = 2'-deoxy-2'-fluoroguanosine-3'-phosphate
  modified_base 12: mod_base = OTHER; note = 2'-O-methyluridine-3'-phosphate
  modified_base 13: mod_base = OTHER; note = 2'-O-methyluridine-3'-phosphate
  modified_base 14: mod_base = OTHER; note = 2'-O-methylguanosine-3'-phosphate
  modified_base 15: mod_base = OTHER; note = 2'-O-methylguanosine-3'-phosphate
  modified_base 16: mod_base = OTHER; note = 2'-O-methylcytidine-3'-phosphate
  modified_base 17: mod_base = OTHER; note = 2'-O-methyluridine-3'-phosphate
  modified_base 18: mod_base = OTHER; note = 2'-O-methylcytidine-3'-phosphate
  modified_base 19: mod_base = OTHER; note = 2'-O-methyladenosine-3'-phosphate
  modified_base 20: mod_base = OTHER; note = 2'-O-methyladenosine-3'-phosphate
  modified_base 21: mod_base = OTHER; note 2'-O-methyluridine-3'-phosphate-N-[tris(GalNAc-alkyl)-amido decanoyl)]-4-hydroxyprolinol (Hyp-(GalNAc-alkyl)3)
cccgtcgtgcgttggctcaat

SEQ ID NO: 348 - RNA, 21 nt, synthetic construct
  source 1..21: mol_type = other RNA
  modified_base 1: mod_base = OTHER; note = 2'-O-methylcytidine-3'-phosphorothioate
  modified_base 2: mod_base = OTHER; note = 2'-O-methylguanosine-3'-phosphorothioate
  modified_base 3: mod_base = OTHER; note = 2'-O-methyluridine-3'-phosphate
  modified_base 4: mod_base = OTHER; note = 2'-O-methylguanosine-3'-phosphate
  modified_base 5: mod_base = OTHER; note = 2'-O-methylcytidine-3'-phosphate
  modified_base 6: mod_base = OTHER; note = 2'-O-methylguanosine-3'-phosphate
  modified_base 7: mod_base = OTHER; note = 2'-deoxy-2'-fluorouridine-3'-phosphate
  modified_base 8: mod_base = OTHER; note = 2'-O-methyluridine-3'-phosphate
  modified_base 9: mod_base = OTHER; note = 2'-deoxy-2'-fluoroguanosine-3'-phosphate
  modified_base 10: mod_base = OTHER; note = 2'-deoxy-2'-fluoroguanosine-3'-phosphate
  modified_base 11: mod_base = OTHER; note = 2'-deoxy-2'-fluorocytidine-3'-phosphate
  modified_base 12: mod_base = OTHER; note = 2'-O-methyluridine-3'-phosphate
  modified_base 13: mod_base = OTHER; note = 2'-O-methylcytidine-3'-phosphate
  modified_base 14: mod_base = OTHER; note = 2'-O-methyladenosine-3'-phosphate
  modified_base 15: mod_base = OTHER; note = 2'-O-methyladenosine-3'-phosphate
  modified_base 16: mod_base = OTHER; note = 2'-O-methyluridine-3'-phosphate
  modified_base 17: mod_base = OTHER; note = 2'-O-methylguanosine-3'-phosphate
  modified_base 18: mod_base = OTHER; note = 2'-O-methyladenosine-3'-phosphate
  modified_base 19: mod_base = OTHER; note = 2'-O-methyladenosine-3'-phosphate
  modified_base 20: mod_base = OTHER; note = 2'-O-methylcytidine-3'-phosphate
  modified_base 21: mod_base = OTHER; note 2'-O-methyluridine-3'-phosphate-N-[tris(GalNAc-alkyl)-amido decanoyl)]-4-hydroxyprolinol (Hyp-(GalNAc-alkyl)3)
cgtgcgttggctcaatgaact

SEQ ID NO: 349 - RNA, 21 nt, synthetic construct
  source 1..21: mol_type = other RNA
  modified_base 1: mod_base = OTHER; note = 2'-O-methylcytidine-3'-phosphorothioate
  modified_base 2: mod_base = OTHER; note = 2'-O-methyladenosine-3'-phosphorothioate
  modified_base 3: mod_base = OTHER; note = 2'-O-methylcytidine-3'-phosphate
  modified_base 4: mod_base = OTHER; note = 2'-O-methylcytidine-3'-phosphate
  modified_base 5: mod_base = OTHER; note = 2'-O-methylguanosine-3'-phosphate
  modified_base 6: mod_base = OTHER; note = 2'-O-methyluridine-3'-phosphate
  modified_base 7: mod_base = OTHER; note = 2'-deoxy-2'-fluoroadenosine-3'-phosphate
  modified_base 8: mod_base = OTHER; note = 2'-O-methyluridine-3'-phosphate
  modified_base 9: mod_base = OTHER; note = 2'-deoxy-2'-fluorocytidine-3'-phosphate
  modified_base 10: mod_base = OTHER; note = 2'-deoxy-2'-fluorocytidine-3'-phosphate
  modified_base 11: mod_base = OTHER; note = 2'-deoxy-2'-fluoroadenosine-3'-phosphate
  modified_base 12: mod_base = OTHER; note = 2'-O-methylcytidine-3'-phosphate
  modified_base 13: mod_base = OTHER; note = 2'-O-methyluridine-3'-phosphate
  modified_base 14: mod_base = OTHER; note = 2'-O-methylguanosine-3'-phosphate
  modified_base 15: mod_base = OTHER; note = 2'-O-methylguanosine-3'-phosphate
  modified_base 16: mod_base = OTHER; note = 2'-O-methylguanosine-3'-phosphate
  modified_base 17: mod_base = OTHER; note = 2'-O-methyladenosine-3'-phosphate
  modified_base 18: mod_base = OTHER; note = 2'-O-methyladenosine-3'-phosphate
  modified_base 19: mod_base = OTHER; note = 2'-O-methyluridine-3'-phosphate
  modified_base 20: mod_base = OTHER; note = 2'-O-methylcytidine-3'-phosphate
  modified_base 21: mod_base = OTHER; note 2'-O-methyluridine-3'-phosphate-N-[tris(GalNAc-alkyl)-amido decanoyl)]-4-hydroxyprolinol (Hyp-(GalNAc-alkyl)3)
caccgtatccactgggaatct

SEQ ID NO: 350 - RNA, 21 nt, synthetic construct
  source 1..21: mol_type = other RNA
  modified_base 1: mod_base = OTHER; note = 2'-O-methyluridine-3'-phosphorothioate
  modified_base 2: mod_base = OTHER; note = 2'-O-methylguanosine-3'-phosphorothioate
  modified_base 3: mod_base = OTHER; note = 2'-O-methylcytidine-3'-phosphate
  modified_base 4: mod_base = OTHER; note = 2'-O-methylguanosine-3'-phosphate
  modified_base 5: mod_base = OTHER; note = 2'-O-methyladenosine-3'-phosphate
  modified_base 6: mod_base = OTHER; note = 2'-O-methyluridine-3'-phosphate
  modified_base 7: mod_base = OTHER; note = 2'-deoxy-2'-fluorocytidine-3'-phosphate
  modified_base 8: mod_base = OTHER; note = 2'-O-methyladenosine-3'-phosphate
  modified_base 9: mod_base = OTHER; note = 2'-deoxy-2'-fluoroguanosine-3'-phosphate
  modified_base 10: mod_base = OTHER; note = 2'-deoxy-2'-fluoroadenosine-3'-phosphate
  modified_base 11: mod_base = OTHER; note = 2'-deoxy-2'-fluoroadenosine-3'-phosphate
  modified_base 12: mod_base = OTHER; note = 2'-O-methylguanosine-3'-phosphate
  modified_base 13: mod_base = OTHER; note = 2'-O-methyladenosine-3'-phosphate
  modified_base 14: mod_base = OTHER; note = 2'-O-methylguanosine-3'-phosphate
  modified_base 15: mod_base = OTHER; note = 2'-O-methyladenosine-3'-phosphate
  modified_base 16: mod_base = OTHER; note = 2'-O-methylcytidine-3'-phosphate
  modified_base 17: mod_base = OTHER; note = 2'-O-methylcytidine-3'-phosphate
  modified_base 18: mod_base = OTHER; note = 2'-O-methyladenosine-3'-phosphate
  modified_base 19: mod_base = OTHER; note = 2'-O-methyladenosine-3'-phosphate
  modified_base 20: mod_base = OTHER; note = 2'-O-methylguanosine-3'-phosphate
  modified_base 21: mod_base = OTHER; note 2'-O-methyluridine-3'-phosphate-N-[tris(GalNAc-alkyl)-amido decanoyl)]-4-hydroxyprolinol (Hyp-(GalNAc-alkyl)3)
tgcgatcagaagagaccaagt

SEQ ID NO: 351 - RNA, 21 nt, synthetic construct
  source 1..21: mol_type = other RNA
  modified_base 1: mod_base = OTHER; note = 2'-O-methyluridine-3'-phosphorothioate
  modified_base 2: mod_base = OTHER; note = 2'-O-methylguanosine-3'-phosphorothioate
  modified_base 3: mod_base = OTHER; note = 2'-O-methylcytidine-3'-phosphate
  modified_base 4: mod_base = OTHER; note = 2'-O-methyluridine-3'-phosphate
  modified_base 5: mod_base = OTHER; note = 2'-O-methyladenosine-3'-phosphate
  modified_base 6: mod_base = OTHER; note = 2'-O-methyladenosine-3'-phosphate
  modified_base 7: mod_base = OTHER; note = 2'-deoxy-2'-fluoroguanosine-3'-phosphate
  modified_base 8: mod_base = OTHER; note = 2'-O-methylguanosine-3'-phosphate
  modified_base 9: mod_base = OTHER; note = 2'-deoxy-2'-fluorocytidine-3'-phosphate
  modified_base 10: mod_base = OTHER; note = 2'-deoxy-2'-fluorocytidine-3'-phosphate
  modified_base 11: mod_base = OTHER; note = 2'-deoxy-2'-fluoroadenosine-3'-phosphate
  modified_base 12: mod_base = OTHER; note = 2'-O-methyladenosine-3'-phosphate
  modified_base 13: mod_base = OTHER; note = 2'-O-methyladenosine-3'-phosphate
  modified_base 14: mod_base = OTHER; note = 2'-O-methylguanosine-3'-phosphate
  modified_base 15: mod_base = OTHER; note = 2'-O-methyladenosine-3'-phosphate
  modified_base 16: mod_base = OTHER; note = 2'-O-methyluridine-3'-phosphate
  modified_base 17: mod_base = OTHER; note = 2'-O-methylcytidine-3'-phosphate
  modified_base 18: mod_base = OTHER; note = 2'-O-methyladenosine-3'-phosphate
  modified_base 19: mod_base = OTHER; note = 2'-O-methyladenosine-3'-phosphate
  modified_base 20: mod_base = OTHER; note = 2'-O-methylcytidine-3'-phosphate
  modified_base 21: mod_base = OTHER; note 2'-O-methyluridine-3'-phosphate-N-[tris(GalNAc-alkyl)-amido decanoyl)]-4-hydroxyprolinol (Hyp-(GalNAc-alkyl)3)
tgctaaggccaaagatcaact

SEQ ID NO: 352 - RNA, 21 nt, synthetic construct
  source 1..21: mol_type = other RNA
  modified_base 1: mod_base = OTHER; note = 2'-O-methylcytidine-3'-phosphorothioate
  modified_base 2: mod_base = OTHER; note = 2'-O-methyladenosine-3'-phosphorothioate
  modified_base 3: mod_base = OTHER; note = 2'-O-methyladenosine-3'-phosphate
  modified_base 4: mod_base = OTHER; note = 2'-O-methylguanosine-3'-phosphate
  modified_base 5: mod_base = OTHER; note = 2'-O-methylguanosine-3'-phosphate
  modified_base 6: mod_base = OTHER; note = 2'-O-methyluridine-3'-phosphate
  modified_base 7: mod_base = OTHER; note = 2'-deoxy-2'-fluorocytidine-3'-phosphate
  modified_base 8: mod_base = OTHER; note = 2'-O-methyluridine-3'-phosphate
  modified_base 9: mod_base = OTHER; note = 2'-deoxy-2'-fluoroadenosine-3'-phosphate
  modified_base 10: mod_base = OTHER; note = 2'-deoxy-2'-fluorocytidine-3'-phosphate
  modified_base 11: mod_base = OTHER; note = 2'-deoxy-2'-fluoroguanosine-3'-phosphate
  modified_base 12: mod_base = OTHER; note = 2'-O-methylcytidine-3'-phosphate
  modified_base 13: mod_base = OTHER; note = 2'-O-methylcytidine-3'-phosphate
  modified_base 14: mod_base = OTHER; note = 2'-O-methyluridine-3'-phosphate
  modified_base 15: mod_base = OTHER; note = 2'-O-methyladenosine-3'-phosphate
  modified_base 16: mod_base = OTHER; note = 2'-O-methyluridine-3'-phosphate
  modified_base 17: mod_base = OTHER; note = 2'-O-methyluridine-3'-phosphate
  modified_base 18: mod_base = OTHER; note = 2'-O-methyladenosine-3'-phosphate
  modified_base 19: mod_base = OTHER; note = 2'-O-methylcytidine-3'-phosphate
  modified_base 20: mod_base = OTHER; note = 2'-O-methyladenosine-3'-phosphate
  modified_base 21: mod_base = OTHER; note 2'-O-methyluridine-3'-phosphate-N-[tris(GalNAc-alkyl)-amido decanoyl)]-4-hydroxyprolinol (Hyp-(GalNAc-alkyl)3)
caaggtctacgcctattacat

SEQ ID NO: 353 - RNA, 21 nt, synthetic construct
  source 1..21: mol_type = other RNA
  modified_base 1: mod_base = OTHER; note = 2'-O-methylcytidine-3'-phosphorothioate
  modified_base 2: mod_base = OTHER; note = 2'-O-methyladenosine-3'-phosphorothioate
  modified_base 3: mod_base = OTHER; note = 2'-O-methyladenosine-3'-phosphate
  modified_base 4: mod_base = OTHER; note = 2'-O-methylguanosine-3'-phosphate
  modified_base 5: mod_base = OTHER; note = 2'-O-methylguanosine-3'-phosphate
  modified_base 6: mod_base = OTHER; note = 2'-O-methyluridine-3'-phosphate
  modified_base 7: mod_base = OTHER; note = 2'-deoxy-2'-fluorocytidine-3'-phosphate
  modified_base 8: mod_base = OTHER; note = 2'-O-methyluridine-3'-phosphate
  modified_base 9: mod_base = OTHER; note = 2'-deoxy-2'-fluoroadenosine-3'-phosphate
  modified_base 10: mod_base = OTHER; note = 2'-deoxy-2'-fluorocytidine-3'-phosphate
  modified_base 11: mod_base = OTHER; note = 2'-deoxy-2'-fluoroguanosine-3'-phosphate
  modified_base 12: mod_base = OTHER; note = 2'-O-methylcytidine-3'-phosphate
  modified_base 13: mod_base = OTHER; note = 2'-O-methylcytidine-3'-phosphate
  modified_base 14: mod_base = OTHER; note = 2'-O-methyluridine-3'-phosphate
  modified_base 15: mod_base = OTHER; note = 2'-O-methyladenosine-3'-phosphate
  modified_base 16: mod_base = OTHER; note = 2'-O-methyluridine-3'-phosphate
  modified_base 17: mod_base = OTHER; note = 2'-O-methyluridine-3'-phosphate
  modified_base 18: mod_base = OTHER; note = 2'-O-methyladenosine-3'-phosphate
  modified_base 19: mod_base = OTHER; note = 2'-O-methylcytidine-3'-phosphate
  modified_base 20: mod_base = OTHER; note = 2'-O-methyladenosine-3'-phosphate
  modified_base 21: mod_base = OTHER; note 2'-O-methyluridine-3'-phosphate-N-[tris(GalNAc-alkyl)-amido decanoyl)]-4-hydroxyprolinol (Hyp-(GalNAc-alkyl)3)
caaggtctacgcctattacat

SEQ ID NO: 354 - RNA, 21 nt, synthetic construct
  source 1..21: mol_type = other RNA
  modified_base 1: mod_base = OTHER; note = 2'-O-methylcytidine-3'-phosphorothioate
  modified_base 2: mod_base = OTHER; note = 2'-O-methyladenosine-3'-phosphorothioate
  modified_base 3: mod_base = OTHER; note = 2'-O-methyladenosine-3'-phosphate
  modified_base 4: mod_base = OTHER; note = 2'-O-methylguanosine-3'-phosphate
  modified_base 5: mod_base = OTHER; note = 2'-O-methylguanosine-3'-phosphate
  modified_base 6: mod_base = OTHER; note = 2'-O-methyluridine-3'-phosphate
  modified_base 7: mod_base = OTHER; note = 2'-deoxy-2'-fluorocytidine-3'-phosphate
  modified_base 8: mod_base = OTHER; note = 2'-O-methyluridine-3'-phosphate
  modified_base 9: mod_base = OTHER; note = 2'-deoxy-2'-fluoroadenosine-3'-phosphate
  modified_base 10: mod_base = OTHER; note = 2'-deoxy-2'-fluorocytidine-3'-phosphate
  modified_base 11: mod_base = OTHER; note = 2'-deoxy-2'-fluoroguanosine-3'-phosphate
  modified_base 12: mod_base = OTHER; note = 2'-O-methylcytidine-3'-phosphate
  modified_base 13: mod_base = OTHER; note = 2'-O-methylcytidine-3'-phosphate
  modified_base 14: mod_base = OTHER; note = 2'-O-methyluridine-3'-phosphate
  modified_base 15: mod_base = OTHER; note = 2'-O-methyladenosine-3'-phosphate
  modified_base 16: mod_base = OTHER; note = 2'-O-methyluridine-3'-phosphate
  modified_base 17: mod_base = OTHER; note = 2'-O-methyluridine-3'-phosphate
  modified_base 18: mod_base = OTHER; note = 2'-O-methyladenosine-3'-phosphate
  modified_base 19: mod_base = OTHER; note = 2'-O-methylcytidine-3'-phosphate
  modified_base 20: mod_base = OTHER; note = 2'-O-methyladenosine-3'-phosphate
  modified_base 21: mod_base = OTHER; note 2'-O-methyluridine-3'-phosphate-N-[tris(GalNAc-alkyl)-amido decanoyl)]-4-hydroxyprolinol (Hyp-(GalNAc-alkyl)3)
caaggtctacgcctattacat

SEQ ID NO: 355 - RNA, 21 nt, synthetic construct
  source 1..21: mol_type = other RNA
  modified_base 1: mod_base = OTHER; note = 2'-O-methylguanosine-3'-phosphorothioate
  modified_base 2: mod_base = OTHER; note = 2'-O-methylcytidine-3'-phosphorothioate
  modified_base 3: mod_base = OTHER; note = 2'-O-methyluridine-3'-phosphate
  modified_base 4: mod_base = OTHER; note = 2'-O-methylguanosine-3'-phosphate
  modified_base 5: mod_base = OTHER; note = 2'-O-methyladenosine-3'-phosphate
  modified_base 6: mod_base = OTHER; note = 2'-O-methylguanosine-3'-phosphate
  modified_base 7: mod_base = OTHER; note = 2'-deoxy-2'-fluoroguanosine-3'-phosphate
  modified_base 8: mod_base = OTHER; note = 2'-O-methyladenosine-3'-phosphate
  modified_base 9: mod_base = OTHER; note = 2'-deoxy-2'-fluoroguanosine-3'-phosphate
  modified_base 10: mod_base = OTHER; note = 2'-deoxy-2'-fluoroadenosine-3'-phosphate
  modified_base 11: mod_base = OTHER; note = 2'-deoxy-2'-fluoroadenosine-3'-phosphate
  modified_base 12: mod_base = OTHER; note = 2'-O-methyluridine-3'-phosphate
  modified_base 13: mod_base = OTHER; note = 2'-O-methyluridine-3'-phosphate
  modified_base 14: mod_base = OTHER; note = 2'-O-methylguanosine-3'-phosphate
  modified_base 15: mod_base = OTHER; note = 2'-O-methylcytidine-3'-phosphate
  modified_base 16: mod_base = OTHER; note = 2'-O-methyluridine-3'-phosphate
  modified_base 17: mod_base = OTHER; note = 2'-O-methyluridine-3'-phosphate
  modified_base 18: mod_base = OTHER; note = 2'-O-methylcytidine-3'-phosphate
  modified_base 19: mod_base = OTHER; note = 2'-O-methyladenosine-3'-phosphate
  modified_base 20: mod_base = OTHER; note = 2'-O-methyluridine-3'-phosphate
  modified_base 21: mod_base = OTHER; note 2'-O-methyluridine-3'-phosphate-N-[tris(GalNAc-alkyl)-amido decanoyl)]-4-hydroxyprolinol (Hyp-(GalNAc-alkyl)3)
gctgaggagaattgcttcatt

SEQ ID NO: 356 - RNA, 21 nt, synthetic construct
  source 1..21: mol_type = other RNA
  modified_base 1: mod_base = OTHER; note = 2'-O-methylguanosine-3'-phosphorothioate
  modified_base 2: mod_base = OTHER; note = 2'-O-methylcytidine-3'-phosphorothioate
  modified_base 3: mod_base = OTHER; note = 2'-O-methyluridine-3'-phosphate
  modified_base 4: mod_base = OTHER; note = 2'-O-methylguanosine-3'-phosphate
  modified_base 5: mod_base = OTHER; note = 2'-O-methyladenosine-3'-phosphate
  modified_base 6: mod_base = OTHER; note = 2'-O-methylguanosine-3'-phosphate
  modified_base 7: mod_base = OTHER; note = 2'-deoxy-2'-fluoroguanosine-3'-phosphate
  modified_base 8: mod_base = OTHER; note = 2'-O-methyladenosine-3'-phosphate
  modified_base 9: mod_base = OTHER; note = 2'-deoxy-2'-fluoroguanosine-3'-phosphate
  modified_base 10: mod_base = OTHER; note = 2'-deoxy-2'-fluoroadenosine-3'-phosphate
  modified_base 11: mod_base = OTHER; note = 2'-deoxy-2'-fluoroadenosine-3'-phosphate
  modified_base 12: mod_base = OTHER; note = 2'-O-methyluridine-3'-phosphate
  modified_base 13: mod_base = OTHER; note = 2'-O-methyluridine-3'-phosphate
  modified_base 14: mod_base = OTHER; note = 2'-O-methylguanosine-3'-phosphate
  modified_base 15: mod_base = OTHER; note = 2'-O-methylcytidine-3'-phosphate
  modified_base 16: mod_base = OTHER; note = 2'-O-methyluridine-3'-phosphate
  modified_base 17: mod_base = OTHER; note = 2'-O-methyluridine-3'-phosphate
  modified_base 18: mod_base = OTHER; note = 2'-O-methylcytidine-3'-phosphate
  modified_base 19: mod_base = OTHER; note = 2'-O-methyladenosine-3'-phosphate
  modified_base 20: mod_base = OTHER; note = 2'-O-methyluridine-3'-phosphate
  modified_base 21: mod_base = OTHER; note 2'-O-methyluridine-3'-phosphate-N-[tris(GalNAc-alkyl)-amido decanoyl)]-4-hydroxyprolinol (Hyp-(GalNAc-alkyl)3)
gctgaggagaattgcttcatt

SEQ ID NO: 357 - RNA, 21 nt, synthetic construct
  source 1..21: mol_type = other RNA
  modified_base 1: mod_base = OTHER; note = 2'-O-methylguanosine-3'-phosphorothioate
  modified_base 2: mod_base = OTHER; note = 2'-O-methylcytidine-3'-phosphorothioate
  modified_base 3: mod_base = OTHER; note = 2'-O-methyluridine-3'-phosphate
  modified_base 4: mod_base = OTHER; note = 2'-O-methylguanosine-3'-phosphate
  modified_base 5: mod_base = OTHER; note = 2'-O-methyladenosine-3'-phosphate
  modified_base 6: mod_base = OTHER; note = 2'-O-methylguanosine-3'-phosphate
  modified_base 7: mod_base = OTHER; note = 2'-deoxy-2'-fluoroguanosine-3'-phosphate
  modified_base 8: mod_base = OTHER; note = 2'-O-methyladenosine-3'-phosphate
  modified_base 9: mod_base = OTHER; note = 2'-deoxy-2'-fluoroguanosine-3'-phosphate
  modified_base 10: mod_base = OTHER; note = 2'-deoxy-2'-fluoroadenosine-3'-phosphate
  modified_base 11: mod_base = OTHER; note = 2'-deoxy-2'-fluoroadenosine-3'-phosphate
  modified_base 12: mod_base = OTHER; note = 2'-O-methyluridine-3'-phosphate
  modified_base 13: mod_base = OTHER; note = 2'-O-methyluridine-3'-phosphate
  modified_base 14: mod_base = OTHER; note = 2'-O-methylguanosine-3'-phosphate
  modified_base 15: mod_base = OTHER; note = 2'-O-methylcytidine-3'-phosphate
  modified_base 16: mod_base = OTHER; note = 2'-O-methyluridine-3'-phosphate
  modified_base 17: mod_base = OTHER; note = 2'-O-methyluridine-3'-phosphate
  modified_base 18: mod_base = OTHER; note = 2'-O-methylcytidine-3'-phosphate
  modified_base 19: mod_base = OTHER; note = 2'-O-methyladenosine-3'-phosphate
  modified_base 20: mod_base = OTHER; note = 2'-O-methyluridine-3'-phosphate
  modified_base 21: mod_base = OTHER; note 2'-O-methyluridine-3'-phosphate-N-[tris(GalNAc-alkyl)-amido decanoyl)]-4-hydroxyprolinol (Hyp-(GalNAc-alkyl)3)
gctgaggagaattgcttcatt

SEQ ID NO: 358 - RNA, 21 nt, synthetic construct
  source 1..21: mol_type = other RNA
  modified_base 1: mod_base = OTHER; note = 2'-O-methyladenosine-3'-phosphorothioate
  modified_base 2: mod_base = OTHER; note = 2'-O-methylguanosine-3'-phosphorothioate
  modified_base 3: mod_base = OTHER; note = 2'-O-methyluridine-3'-phosphate
  modified_base 4: mod_base = OTHER; note = 2'-O-methylguanosine-3'-phosphate
  modified_base 5: mod_base = OTHER; note = 2'-O-methylguanosine-3'-phosphate
  modified_base 6: mod_base = OTHER; note = 2'-O-methyladenosine-3'-phosphate
  modified_base 7: mod_base = OTHER; note = 2'-deoxy-2'-fluorocytidine-3'-phosphate
  modified_base 8: mod_base = OTHER; note = 2'-O-methyluridine-3'-phosphate
  modified_base 9: mod_base = OTHER; note = 2'-deoxy-2'-fluoroadenosine-3'-phosphate
  modified_base 10: mod_base = OTHER; note = 2'-deoxy-2'-fluorouridine-3'-phosphate
  modified_base 11: mod_base = OTHER; note = 2'-deoxy-2'-fluoroguanosine-3'-phosphate
  modified_base 12: mod_base = OTHER; note = 2'-O-methyluridine-3'-phosphate
  modified_base 13: mod_base = OTHER; note = 2'-O-methylguanosine-3'-phosphate
  modified_base 14: mod_base = OTHER; note = 2'-O-methyluridine-3'-phosphate
  modified_base 15: mod_base = OTHER; note = 2'-O-methyladenosine-3'-phosphate
  modified_base 16: mod_base = OTHER; note = 2'-O-methylcytidine-3'-phosphate
  modified_base 17: mod_base = OTHER; note = 2'-O-methyladenosine-3'-phosphate
  modified_base 18: mod_base = OTHER; note = 2'-O-methyladenosine-3'-phosphate
  modified_base 19: mod_base = OTHER; note = 2'-O-methylguanosine-3'-phosphate
  modified_base 20: mod_base = OTHER; note = 2'-O-methyladenosine-3'-phosphate
  modified_base 21: mod_base = OTHER; note 2'-O-methyluridine-3'-phosphate-N-[tris(GalNAc-alkyl)-amido decanoyl)]-4-hydroxyprolinol (Hyp-(GalNAc-alkyl)3)
agtggactatgtgtacaagat

SEQ ID NO: 359 - RNA, 21 nt, synthetic construct
  source 1..21: mol_type = other RNA
  modified_base 1: mod_base = OTHER; note = 2'-O-methyluridine-3'-phosphorothioate
  modified_base 2: mod_base = OTHER; note = 2'-O-methylguanosine-3'-phosphorothioate
  modified_base 3: mod_base = OTHER; note = 2'-O-methylguanosine-3'-phosphate
  modified_base 4: mod_base = OTHER; note = 2'-O-methyladenosine-3'-phosphate
  modified_base 5: mod_base = OTHER; note = 2'-O-methylcytidine-3'-phosphate
  modified_base 6: mod_base = OTHER; note = 2'-O-methyluridine-3'-phosphate
  modified_base 7: mod_base = OTHER; note = 2'-deoxy-2'-fluoroadenosine-3'-phosphate
  modified_base 8: mod_base = OTHER; note = 2'-O-methyluridine-3'-phosphate
  modified_base 9: mod_base = OTHER; note = 2'-deoxy-2'-fluoroguanosine-3'-phosphate
  modified_base 10: mod_base = OTHER; note = 2'-deoxy-2'-fluorouridine-3'-phosphate
  modified_base 11: mod_base = OTHER; note = 2'-deoxy-2'-fluoroguanosine-3'-phosphate
  modified_base 12: mod_base = OTHER; note = 2'-O-methyluridine-3'-phosphate
  modified_base 13: mod_base = OTHER; note = 2'-O-methyladenosine-3'-phosphate
  modified_base 14: mod_base = OTHER; note = 2'-O-methylcytidine-3'-phosphate
  modified_base 15: mod_base = OTHER; note = 2'-O-methyladenosine-3'-phosphate
  modified_base 16: mod_base = OTHER; note = 2'-O-methyladenosine-3'-phosphate
  modified_base 17: mod_base = OTHER; note = 2'-O-methylguanosine-3'-phosphate
  modified_base 18: mod_base = OTHER; note = 2'-O-methyladenosine-3'-phosphate
  modified_base 19: mod_base = OTHER; note = 2'-O-methylcytidine-3'-phosphate
  modified_base 20: mod_base = OTHER; note = 2'-O-methylcytidine-3'-phosphate
  modified_base 21: mod_base = OTHER; note 2'-O-methyluridine-3'-phosphate-N-[tris(GalNAc-alkyl)-amido decanoyl)]-4-hydroxyprolinol (Hyp-(GalNAc-alkyl)3)
tggactatgtgtacaagacct

SEQ ID NO: 360 - RNA, 21 nt, synthetic construct
  source 1..21: mol_type = other RNA
  modified_base 1: mod_base = OTHER; note = 2'-O-methylguanosine-3'-phosphorothioate
  modified_base 2: mod_base = OTHER; note = 2'-O-methyladenosine-3'-phosphorothioate
  modified_base 3: mod_base = OTHER; note = 2'-O-methylguanosine-3'-phosphate
  modified_base 4: mod_base = OTHER; note = 2'-O-methyladenosine-3'-phosphate
  modified_base 5: mod_base = OTHER; note = 2'-O-methyladenosine-3'-phosphate
  modified_base 6: mod_base = OTHER; note = 2'-O-methylcytidine-3'-phosphate
  modified_base 7: mod_base = OTHER; note = 2'-deoxy-2'-fluorocytidine-3'-phosphate
  modified_base 8: mod_base = OTHER; note = 2'-O-methyladenosine-3'-phosphate
  modified_base 9: mod_base = OTHER; note = 2'-deoxy-2'-fluoroguanosine-3'-phosphate
  modified_base 10: mod_base = OTHER; note = 2'-deoxy-2'-fluoroadenosine-3'-phosphate
  modified_base 11: mod_base = OTHER; note = 2'-deoxy-2'-fluoroadenosine-3'-phosphate
  modified_base 12: mod_base = OTHER; note = 2'-O-methyladenosine-3'-phosphate
  modified_base 13: mod_base = OTHER; note = 2'-O-methylcytidine-3'-phosphate
  modified_base 14: mod_base = OTHER; note = 2'-O-methyladenosine-3'-phosphate
  modified_base 15: mod_base = OTHER; note = 2'-O-methyladenosine-3'-phosphate
  modified_base 16: mod_base = OTHER; note = 2'-O-methyluridine-3'-phosphate
  modified_base 17: mod_base = OTHER; note = 2'-O-methylguanosine-3'-phosphate
  modified_base 18: mod_base = OTHER; note = 2'-O-methylcytidine-3'-phosphate
  modified_base 19: mod_base = OTHER; note = 2'-O-methylcytidine-3'-phosphate
  modified_base 20: mod_base = OTHER; note = 2'-O-methyladenosine-3'-phosphate
  modified_base 21: mod_base = OTHER; note 2'-O-methyluridine-3'-phosphate-N-[tris(GalNAc-alkyl)-amido decanoyl)]-4-hydroxyprolinol (Hyp-(GalNAc-alkyl)3)
gagaaccagaaacaatgccat

SEQ ID NO: 361 - RNA, 23 nt, synthetic construct
  source 1..23: mol_type = other RNA
  modified_base 5: mod_base = OTHER; note = 5'-methyluridine-3'-phosphate
  modified_base 7: mod_base = OTHER; note = 5'-methyluridine-3'-phosphate
aaattgtagagaacggctcggat

SEQ ID NO: 362 - RNA, 23 nt, synthetic construct
  source 1..23: mol_type = other RNA
  modified_base 5: mod_base = OTHER; note = 5'-methyluridine-3'-phosphate
  modified_base 7: mod_base = OTHER; note = 5'-methyluridine-3'-phosphate
taattgtagagaacggctcggat

SEQ ID NO: 363 - RNA, 23 nt, synthetic construct
  source 1..23: mol_type = other RNA
  modified_base 5: mod_base = OTHER; note = 5'-methyluridine-3'-phosphate
  modified_base 7: mod_base = OTHER; note = 5'-methyluridine-3'-phosphate
aaattgtagagaacggctcgggt

SEQ ID NO: 364 - RNA, 21 nt, synthetic construct
  source 1..21: mol_type = other RNA
  modified_base 5: mod_base = OTHER; note = 5'-methyluridine-3'-phosphate
  modified_base 7: mod_base = OTHER; note = 5'-methyluridine-3'-phosphate
aaattgtagagaacggctcgg

SEQ ID NO: 365 - RNA, 23 nt, synthetic construct
  source 1..23: mol_type = other RNA
  modified_base 5: mod_base = OTHER; note = 5'-methyluridine-3'-phosphate
  modified_base 7: mod_base = OTHER; note = 5'-methyluridine-3'-phosphate
aaattgtagagaacgggtcggat

SEQ ID NO: 366 - RNA, 23 nt, synthetic construct
  source 1..23: mol_type = other RNA
  modified_base 5: mod_base = OTHER; note = 5'-methyluridine-3'-phosphate
  modified_base 7: mod_base = OTHER; note = 5'-methyluridine-3'-phosphate
aaattgtagagaacggcacggat

SEQ ID NO: 367 - RNA, 23 nt, synthetic construct
  source 1..23: mol_type = other RNA
  modified_base 5: mod_base = OTHER; note = 5'-methyluridine-3'-phosphate
  modified_base 7: mod_base = OTHER; note = 5'-methyluridine-3'-phosphate
aaattgtagagaacggctgggat

SEQ ID NO: 368 - RNA, 23 nt, synthetic construct
  source 1..23: mol_type = other RNA
  modified_base 5: mod_base = OTHER; note = 5'-methyluridine-3'-phosphate
  modified_base 7: mod_base = OTHER; note = 5'-methyluridine-3'-phosphate
aaattgtagagaacgggtcgggt

SEQ ID NO: 369 - RNA, 23 nt, synthetic construct
  source 1..23: mol_type = other RNA
  modified_base 5: mod_base = OTHER; note = 5'-methyluridine-3'-phosphate
  modified_base 7: mod_base = OTHER; note = 5'-methyluridine-3'-phosphate
aaattgtagagaacggcacgggt

SEQ ID NO: 370 - RNA, 23 nt, synthetic construct
  source 1..23: mol_type = other RNA
  modified_base 5: mod_base = OTHER; note = 5'-methyluridine-3'-phosphate
  modified_base 7: mod_base = OTHER; note = 5'-methyluridine-3'-phosphate
aaattgtagagaacggctggggt

SEQ ID NO: 371 - RNA, 21 nt, synthetic construct
  source 1..21: mol_type = other RNA
  modified_base 5: mod_base = OTHER; note = 5'-methyluridine-3'-phosphate
  modified_base 7: mod_base = OTHER; note = 5'-methyluridine-3'-phosphate
aaattgtagagaacgggtcgg

SEQ ID NO: 372 - RNA, 21 nt, synthetic construct
  source 1..21: mol_type = other RNA
  modified_base 5: mod_base = OTHER; note = 5'-methyluridine-3'-phosphate
  modified_base 7: mod_base = OTHER; note = 5'-methyluridine-3'-phosphate
aaattgtagagaacggcacgg

SEQ ID NO: 373 - RNA, 21 nt, synthetic construct
  source 1..21: mol_type = other RNA
  modified_base 5: mod_base = OTHER; note = 5'-methyluridine-3'-phosphate
  modified_base 7: mod_base = OTHER; note = 5'-methyluridine-3'-phosphate
aaattgtagagaacggctggg

SEQ ID NO: 374 - RNA, 23 nt, synthetic construct
  source 1..23: mol_type = other RNA
  modified_base 5: mod_base = OTHER; note = 5'-methyluridine-3'-phosphate
aaattgtagagaacggctcggat

SEQ ID NO: 375 - RNA, 23 nt, synthetic construct
  source 1..23: mol_type = other RNA
  modified_base 2: mod_base = OTHER; note = 5'-methyluridine-3'-phosphate
  modified_base 5: mod_base = OTHER; note = 5'-methyluridine-3'-phosphate
ataattgtagagaacggctcgga

SEQ ID NO: 376 - RNA, 23 nt, synthetic construct
  source 1..23: mol_type = other RNA
  modified_base 2: mod_base = OTHER; note = 5'-methyluridine-3'-phosphate
  modified_base 5: mod_base = OTHER; note = 5'-methyluridine-3'-phosphate
ttaattgtagagaacggctcgga

SEQ ID NO: 377 - RNA, 23 nt, synthetic construct
  source 1..23: mol_type = other RNA
  modified_base 2: mod_base = OTHER; note = 5'-methyluridine-3'-phosphate
  modified_base 5: mod_base = OTHER; note = 5'-methyluridine-3'-phosphate
ataattgtagagaacggctcggg

SEQ ID NO: 378 - RNA, 21 nt, synthetic construct
  source 1..21: mol_type = other RNA
  modified_base 2: mod_base = OTHER; note = 5'-methyluridine-3'-phosphate
  modified_base 5: mod_base = OTHER; note = 5'-methyluridine-3'-phosphate
ataattgtagagaacggctcg

SEQ ID NO: 379 - RNA, 23 nt, synthetic construct
  source 1..23: mol_type = other RNA
  modified_base 2: mod_base = OTHER; note = 5'-methyluridine-3'-phosphate
  modified_base 5: mod_base = OTHER; note = 5'-methyluridine-3'-phosphate
ataattgtagagaacgcctcgga

SEQ ID NO: 380 - RNA, 23 nt, synthetic construct
  source 1..23: mol_type = other RNA
  modified_base 2: mod_base = OTHER; note = 5'-methyluridine-3'-phosphate
  modified_base 5: mod_base = OTHER; note = 5'-methyluridine-3'-phosphate
ataattgtagagaacgggtcgga

SEQ ID NO: 381 - RNA, 23 nt, synthetic construct
  source 1..23: mol_type = other RNA
  modified_base 2: mod_base = OTHER; note = 5'-methyluridine-3'-phosphate
  modified_base 5: mod_base = OTHER; note = 5'-methyluridine-3'-phosphate
ataattgtagagaacggcacgga

SEQ ID NO: 382 - RNA, 23 nt, synthetic construct
  source 1..23: mol_type = other RNA
  modified_base 2: mod_base = OTHER; note = 5'-methyluridine-3'-phosphate
  modified_base 5: mod_base = OTHER; note = 5'-methyluridine-3'-phosphate
ataattgtagagaacgcctcggg

SEQ ID NO: 383 - RNA, 23 nt, synthetic construct
  source 1..23: mol_type = other RNA
  modified_base 2: mod_base = OTHER; note = 5'-methyluridine-3'-phosphate
  modified_base 5: mod_base = OTHER; note = 5'-methyluridine-3'-phosphate
ataattgtagagaacgggtcggg

SEQ ID NO: 384 - RNA, 23 nt, synthetic construct
  source 1..23: mol_type = other RNA
  modified_base 2: mod_base = OTHER; note = 5'-methyluridine-3'-phosphate
  modified_base 5: mod_base = OTHER; note = 5'-methyluridine-3'-phosphate
ataattgtagagaacggcacggg

SEQ ID NO: 385 - RNA, 21 nt, synthetic construct
  source 1..21: mol_type = other RNA
  modified_base 2: mod_base = OTHER; note = 5'-methyluridine-3'-phosphate
  modified_base 5: mod_base = OTHER; note = 5'-methyluridine-3'-phosphate
ataattgtagagaacgcctcg

SEQ ID NO: 386 - RNA, 21 nt, synthetic construct
  source 1..21: mol_type = other RNA
  modified_base 2: mod_base = OTHER; note = 5'-methyluridine-3'-phosphate
  modified_base 5: mod_base = OTHER; note = 5'-methyluridine-3'-phosphate
ataattgtagagaacgggtcg

SEQ ID NO: 387 - RNA, 21 nt, synthetic construct
  source 1..21: mol_type = other RNA
  modified_base 2: mod_base = OTHER; note = 5'-methyluridine-3'-phosphate
  modified_base 5: mod_base = OTHER; note = 5'-methyluridine-3'-phosphate
ataattgtagagaacggcacg

SEQ ID NO: 388 - RNA, 23 nt, synthetic construct
  source 1..23: mol_type = other RNA
  modified_base 2: mod_base = OTHER; note = 5'-methyluridine-3'-phosphate
  modified_base 5: mod_base = OTHER; note = 5'-methyluridine-3'-phosphate
ataattgtagagaacggctcgga

SEQ ID NO: 389 - RNA, 23 nt, synthetic construct
  source 1..23: mol_type = other RNA
  modified_base 7: mod_base = OTHER; note = 5'-methyluridine-3'-phosphate
agtaattgtagagaacggctcgg

SEQ ID NO: 390 - RNA, 23 nt, synthetic construct
  source 1..23: mol_type = other RNA
agtaattgtagagaacggctcgg

SEQ ID NO: 391 - RNA, 23 nt, synthetic construct
  source 1..23: mol_type = other RNA
agtaattgtagagaacggctcgg

SEQ ID NO: 392 - RNA, 23 nt, synthetic construct
  source 1..23: mol_type = other RNA
agtaattgtagagaacggctcgg

SEQ ID NO: 393 - RNA, 23 nt, synthetic construct
  source 1..23: mol_type = other RNA
agtaattgtagagaacggctcgg

SEQ ID NO: 394 - RNA, 23 nt, synthetic construct
  source 1..23: mol_type = other RNA
agtaattgtagagaacggctcgg

SEQ ID NO: 395 - RNA, 23 nt, synthetic construct
  source 1..23: mol_type = other RNA
agtaattgtagagaacggctcgg

SEQ ID NO: 396 - RNA, 23 nt, synthetic construct
  source 1..23: mol_type = other RNA
agtaattgtagagaacggctcgg

SEQ ID NO: 397 - RNA, 23 nt, synthetic construct
  source 1..23: mol_type = other RNA
agtaattgtagagaacggctcgg

SEQ ID NO: 398 - RNA, 23 nt, synthetic construct
  source 1..23: mol_type = other RNA
agtaattgtagagaacggctcgg

SEQ ID NO: 399 - RNA, 23 nt, synthetic construct
  source 1..23: mol_type = other RNA
agtaattgtagagaacggctcgg

SEQ ID NO: 400 - RNA, 23 nt, synthetic construct
  source 1..23: mol_type = other RNA
agtaaatgtagagaacggctcgg

SEQ ID NO: 401 - RNA, 23 nt, synthetic construct
  source 1..23: mol_type = other RNA
agtaatagtagagaacggctcgg

SEQ ID NO: 402 - RNA, 23 nt, synthetic construct
  source 1..23: mol_type = other RNA
agtaattatagagaacggctcgg

SEQ ID NO: 403 - RNA, 23 nt, synthetic construct
  source 1..23: mol_type = other RNA
agtaattgtagacaacggctcgg

SEQ ID NO: 404 - RNA, 23 nt, synthetic construct
  source 1..23: mol_type = other RNA
agtaattgtagagtacggctcgg

SEQ ID NO: 405 - RNA, 23 nt, synthetic construct
  source 1..23: mol_type = other RNA
agtaattgtagagatcggctcgg

SEQ ID NO: 406 - RNA, 23 nt, synthetic construct
  source 1..23: mol_type = other RNA
agtaattgtagagaagggctcgg

SEQ ID NO: 407 - RNA, 23 nt, synthetic construct
  source 1..23: mol_type = other RNA
  modified_base 7: mod_base = OTHER; note = 5'-methyluridine-3'-phosphate
agtaattgtagagaacggctcgg

SEQ ID NO: 408 - RNA, 23 nt, synthetic construct
  source 1..23: mol_type = other RNA
  modified_base 7: mod_base = OTHER; note = 5'-methyluridine-3'-phosphate
tgtaattgtagagaacggctcgg

SEQ ID NO: 409 - RNA, 23 nt, synthetic construct
  source 1..23: mol_type = other RNA
  modified_base 7: mod_base = OTHER; note = 5'-methyluridine-3'-phosphate
agtaattgtagagaaccgctcgg

SEQ ID NO: 410 - RNA, 23 nt, synthetic construct
  source 1..23: mol_type = other RNA
  modified_base 7: mod_base = OTHER; note = 5'-methyluridine-3'-phosphate
agtaattgtagagaacgcctcgg

SEQ ID NO: 411 - RNA, 23 nt, synthetic construct
  source 1..23: mol_type = other RNA
  modified_base 7: mod_base = OTHER; note = 5'-methyluridine-3'-phosphate
agtaattgtagagaacgggtcgg

SEQ ID NO: 412 - RNA, 23 nt, synthetic construct
  source 1..23: mol_type = other RNA
  modified_base 7: mod_base = OTHER; note = 5'-methyluridine-3'-phosphate
agtaattgtagagaacggctcgg

SEQ ID NO: 413 - RNA, 23 nt, synthetic construct
  source 1..23: mol_type = other RNA
agtaattgtagagaacggctcgg

SEQ ID NO: 414 - RNA, 23 nt, synthetic construct
  source 1..23: mol_type = other RNA
tgtaattgtagagaacggctcgg

SEQ ID NO: 415 - RNA, 23 nt, synthetic construct
  source 1..23: mol_type = other RNA
  modified_base 7: mod_base = OTHER; note = 5'-methyluridine-3'-phosphate
agtaattgtagagaacggctcgg

SEQ ID NO: 416 - RNA, 23 nt, synthetic construct
  source 1..23: mol_type = other RNA
  modified_base 7: mod_base = OTHER; note = 5'-methyluridine-3'-phosphate
agtaattgtagagaacggctcgg

SEQ ID NO: 417 - RNA, 23 nt, synthetic construct
  source 1..23: mol_type = other RNA
  modified_base 7: mod_base = OTHER; note = 5'-methyluridine-3'-phosphate
agtaattgtagagaacggctcgg

SEQ ID NO: 418 - RNA, 23 nt, synthetic construct
  source 1..23: mol_type = other RNA
  modified_base 7: mod_base = OTHER; note = 5'-methyluridine-3'-phosphate
agtaattgtagagaacggctcgg

SEQ ID NO: 419 - RNA, 23 nt, synthetic construct
  source 1..23: mol_type = other RNA
  modified_base 2: mod_base = OTHER; note = 5'-methyluridine-3'-phosphate
atagatgtagtagaatttctctg

SEQ ID NO: 420 - RNA, 23 nt, synthetic construct
  source 1..23: mol_type = other RNA
  modified_base 2: mod_base = OTHER; note = 5'-methyluridine-3'-phosphate
ttagatgtagtagaatttctctg

SEQ ID NO: 421 - RNA, 23 nt, synthetic construct
  source 1..23: mol_type = other RNA
  modified_base 2: mod_base = OTHER; note = 5'-methyluridine-3'-phosphate
atagatgtagtagaatttctcct

SEQ ID NO: 422 - RNA, 21 nt, synthetic construct
  source 1..21: mol_type = other RNA
  modified_base 2: mod_base = OTHER; note = 5'-methyluridine-3'-phosphate
atagatgtagtagaatttctc

SEQ ID NO: 423 - RNA, 23 nt, synthetic construct
  source 1..23: mol_type = other RNA
  modified_base 2: mod_base = OTHER; note = 5'-methyluridine-3'-phosphate
atagatgtagtagaatatctctg

SEQ ID NO: 424 - RNA, 23 nt, synthetic construct
  source 1..23: mol_type = other RNA
  modified_base 2: mod_base = OTHER; note = 5'-methyluridine-3'-phosphate
atagatgtagtagaattactctg

SEQ ID NO: 425 - RNA, 23 nt, synthetic construct
  source 1..23: mol_type = other RNA
  modified_base 2: mod_base = OTHER; note = 5'-methyluridine-3'-phosphate
atagatgtagtagaatttgtctg

SEQ ID NO: 426 - RNA, 23 nt, synthetic construct
  source 1..23: mol_type = other RNA
  modified_base 2: mod_base = OTHER; note = 5'-methyluridine-3'-phosphate
atagatatagtagaatttctctg

SEQ ID NO: 427 - RNA, 23 nt, synthetic construct
  source 1..23: mol_type = other RNA
  modified_base 2: mod_base = OTHER; note = 5'-methyluridine-3'-phosphate
atagatgtagtagaatttctctg

SEQ ID NO: 428 - RNA, 23 nt, synthetic construct
  source 1..23: mol_type = other RNA
  modified_base 7: mod_base = OTHER; note = 5'-methyluridine-3'-phosphate
  modified_base 12: mod_base = OTHER; note = 5'-methyluridine-3'-phosphate
aatagatgtagtagaatttctct

SEQ ID NO: 429 - RNA, 23 nt, synthetic construct
  source 1..23: mol_type = other RNA
  modified_base 7: mod_base = OTHER; note = 5'-methyluridine-3'-phosphate
  modified_base 12: mod_base = OTHER; note = 5'-methyluridine-3'-phosphate
aatagatgtagtagaatttctct

SEQ ID NO: 430 - RNA, 23 nt, synthetic construct
  source 1..23: mol_type = other RNA
  modified_base 7: mod_base = OTHER; note = 5'-methyluridine-3'-phosphate
  modified_base 12: mod_base = OTHER; note = 5'-methyluridine-3'-phosphate
tatagatgtagtagaatttctct

SEQ ID NO: 431 - RNA, 23 nt, synthetic construct
  source 1..23: mol_type = other RNA
  modified_base 7: mod_base = OTHER; note = 5'-methyluridine-3'-phosphate
  modified_base 12: mod_base = OTHER; note = 5'-methyluridine-3'-phosphate
tatagatgtagtagaatttctct

SEQ ID NO: 432 - RNA, 23 nt, synthetic construct
  source 1..23: mol_type = other RNA
  modified_base 7: mod_base = OTHER; note = 5'-methyluridine-3'-phosphate
  modified_base 12: mod_base = OTHER; note = 5'-methyluridine-3'-phosphate
aatagatgtagtagaatttctgc

SEQ ID NO: 433 - RNA, 23 nt, synthetic construct
  source 1..23: mol_type = other RNA
  modified_base 7: mod_base = OTHER; note = 5'-methyluridine-3'-phosphate
  modified_base 12: mod_base = OTHER; note = 5'-methyluridine-3'-phosphate
aatagatgtagtagaatttctgc

SEQ ID NO: 434 - RNA, 21 nt, synthetic construct
  source 1..21: mol_type = other RNA
  modified_base 7: mod_base = OTHER; note = 5'-methyluridine-3'-phosphate
  modified_base 12: mod_base = OTHER; note = 5'-methyluridine-3'-phosphate
aatagatgtagtagaatttct

SEQ ID NO: 435 - RNA, 21 nt, synthetic construct
  source 1..21: mol_type = other RNA
  modified_base 7: mod_base = OTHER; note = 5'-methyluridine-3'-phosphate
  modified_base 12: mod_base = OTHER; note = 5'-methyluridine-3'-phosphate
aatagatgtagtagaatttct

SEQ ID NO: 436 - RNA, 23 nt, synthetic construct
  source 1..23: mol_type = other RNA
  modified_base 7: mod_base = OTHER; note = 5'-methyluridine-3'-phosphate
  modified_base 12: mod_base = OTHER; note = 5'-methyluridine-3'-phosphate
aatagatgtagtagaaattctct

SEQ ID NO: 437 - RNA, 23 nt, synthetic construct
  source 1..23: mol_type = other RNA
  modified_base 7: mod_base = OTHER; note = 5'-methyluridine-3'-phosphate
  modified_base 12: mod_base = OTHER; note = 5'-methyluridine-3'-phosphate
aatagatgtagtagaatatctct

SEQ ID NO: 438 - RNA, 23 nt, synthetic construct
  source 1..23: mol_type = other RNA
  modified_base 7: mod_base = OTHER; note = 5'-methyluridine-3'-phosphate
  modified_base 12: mod_base = OTHER; note = 5'-methyluridine-3'-phosphate
aatagatgtagtagaattactct

SEQ ID NO: 439 - RNA, 23 nt, synthetic construct
  source 1..23: mol_type = other RNA
  modified_base 7: mod_base = OTHER; note = 5'-methyluridine-3'-phosphate
  modified_base 12: mod_base = OTHER; note = 5'-methyluridine-3'-phosphate
aatagatgtagtagaaattctct

SEQ ID NO: 440 - RNA, 23 nt, synthetic construct
  source 1..23: mol_type = other RNA
  modified_base 7: mod_base = OTHER; note = 5'-methyluridine-3'-phosphate
  modified_base 12: mod_base = OTHER; note = 5'-methyluridine-3'-phosphate
aatagatgtagtagaatatctct

SEQ ID NO: 441 - RNA, 23 nt, synthetic construct
  source 1..23: mol_type = other RNA
  modified_base 7: mod_base = OTHER; note = 5'-methyluridine-3'-phosphate
  modified_base 12: mod_base = OTHER; note = 5'-methyluridine-3'-phosphate
aatagatgtagtagaattactct

SEQ ID NO: 442 - RNA, 21 nt, synthetic construct
  source 1..21: mol_type = other RNA
  modified_base 7: mod_base = OTHER; note = 5'-methyluridine-3'-phosphate
  modified_base 12: mod_base = OTHER; note = 5'-methyluridine-3'-phosphate
aatagatgtagtagaaattct

SEQ ID NO: 443 - RNA, 21 nt, synthetic construct
  source 1..21: mol_type = other RNA
  modified_base 7: mod_base = OTHER; note = 5'-methyluridine-3'-phosphate
  modified_base 12: mod_base = OTHER; note = 5'-methyluridine-3'-phosphate
aatagatgtagtagaatatct

SEQ ID NO: 444 - RNA, 21 nt, synthetic construct
  source 1..21: mol_type = other RNA
  modified_base 7: mod_base = OTHER; note = 5'-methyluridine-3'-phosphate
  modified_base 12: mod_base = OTHER; note = 5'-methyluridine-3'-phosphate
aatagatgtagtagaattact

SEQ ID NO: 445 - RNA, 23 nt, synthetic construct
  source 1..23: mol_type = other RNA
  modified_base 12: mod_base = OTHER; note = 5'-methyluridine-3'-phosphate
aatagatgtagtagaatttctct

SEQ ID NO: 446 - RNA, 23 nt, synthetic construct
  source 1..23: mol_type = other RNA
atagatgtagtagaatttctctg

SEQ ID NO: 447 - RNA, 23 nt, synthetic construct
  source 1..23: mol_type = other RNA
aatagatgtagtagaatttctct

SEQ ID NO: 448 - RNA, 23 nt, synthetic construct
  source 1..23: mol_type = other RNA
aaattgtagagaacggctcggat

SEQ ID NO: 449 - RNA, 23 nt, synthetic construct
  source 1..23: mol_type = other RNA
ataattgtagagaacggctcgga

SEQ ID NO: 450 - RNA, 23 nt, synthetic construct
  source 1..23: mol_type = other RNA
agtaattgtagagaacggctcgg

SEQ ID NO: 451 - DNA, 23 bp, synthetic construct
  source 1..23: mol_type = other DNA
  modified_base 1: mod_base = OTHER; note = 2'-O-methyladenosine-3'-phosphorothioate
  modified_base 2: mod_base = OTHER; note = 2'-deoxyadenosine-3'-phosphorothioate
  modified_base 3: mod_base = OTHER; note = 2'-O-methyladenosine-3'-phosphate
  modified_base 4: mod_base = OTHER; note = 2'-O-methyluridine-3'-phosphate
  modified_base 6: mod_base = OTHER; note = 2'-O-methylguanosine-3'-phosphate
  modified_base 8: mod_base = OTHER; note = 2'-O-methyladenosine-3'-phosphate
  modified_base 9: mod_base = OTHER; note = 2'-O-methylguanosine-3'-phosphate
  modified_base 10: mod_base = OTHER; note = 2'-O-methyladenosine-3'-phosphate
  modified_base 11: mod_base = OTHER; note = 2'-O-methylguanosine-3'-phosphate
  modified_base 13: mod_base = OTHER; note = 2'-O-methyladenosine-3'-phosphate
  modified_base 14: mod_base = OTHER; note = 2'-deoxy-2'-fluorocytidine-3'-phosphate
  modified_base 15: mod_base = OTHER; note = 2'-O-methylguanosine-3'-phosphate
  modified_base 16: mod_base = OTHER; note = 2'-O-methylguanosine-3'-phosphate
  modified_base 17: mod_base = OTHER; note = 2'-O-methylcytidine-3'-phosphate
  modified_base 18: mod_base = OTHER; note = 2'-O-methyluridine-3'-phosphate
  modified_base 19: mod_base = OTHER; note = 2'-O-methylcytidine-3'-phosphate
  modified_base 20: mod_base = OTHER; note = 2'-O-methylguanosine-3'-phosphate
  modified_base 21: mod_base = OTHER; note = 2'-O-methylguanosine-3'-phosphorothioate
  modified_base 22: mod_base = OTHER; note = 2'-O-methyladenosine-3'-phosphorothioate
  modified_base 23: mod_base = OTHER; note = 2'-O-methyluridine
  misc_feature 1: note = RNA
  misc_feature 3..4: note = RNA
  misc_feature 6: note = RNA
  misc_feature 8..11: note = RNA
  misc_feature 13..23: note = RNA
  misc_feature 2: note = DNA
  misc_feature 5: note = DNA
  misc_feature 7: note = DNA
  misc_feature 12: note = DNA
aaattgtagagaacggctcggat

SEQ ID NO: 452 - DNA, 23 bp, synthetic construct
  source 1..23: mol_type = other DNA
  modified_base 1: mod_base = OTHER; note = 2'-O-methyluridine-3'-phosphorothioate
  modified_base 2: mod_base = OTHER; note = 2'-deoxyadenosine-3'-phosphorothioate
  modified_base 3: mod_base = OTHER; note = 2'-O-methyladenosine-3'-phosphate
  modified_base 4: mod_base = OTHER; note = 2'-O-methyluridine-3'-phosphate
  modified_base 6: mod_base = OTHER; note = 2'-O-methylguanosine-3'-phosphate
  modified_base 8: mod_base = OTHER; note = 2'-O-methyladenosine-3'-phosphate
  modified_base 9: mod_base = OTHER; note = 2'-O-methylguanosine-3'-phosphate
  modified_base 10: mod_base = OTHER; note = 2'-O-methyladenosine-3'-phosphate
  modified_base 11: mod_base = OTHER; note = 2'-O-methylguanosine-3'-phosphate
  modified_base 13: mod_base = OTHER; note = 2'-O-methyladenosine-3'-phosphate
  modified_base 14: mod_base = OTHER; note = 2'-deoxy-2'-fluorocytidine-3'-phosphate
  modified_base 15: mod_base = OTHER; note = 2'-O-methylguanosine-3'-phosphate
  modified_base 16: mod_base = OTHER; note = 2'-O-methylguanosine-3'-phosphate
  modified_base 17: mod_base = OTHER; note = 2'-O-methylcytidine-3'-phosphate
  modified_base 18: mod_base = OTHER; note = 2'-O-methyluridine-3'-phosphate
  modified_base 19: mod_base = OTHER; note = 2'-O-methylcytidine-3'-phosphate
  modified_base 20: mod_base = OTHER; note = 2'-O-methylguanosine-3'-phosphate
  modified_base 21: mod_base = OTHER; note = 2'-O-methylguanosine-3'-phosphorothioate
  modified_base 22: mod_base = OTHER; note = 2'-O-methyladenosine-3'-phosphorothioate
  modified_base 23: mod_base = OTHER; note = 2'-O-methyluridine
  misc_feature 1: note = RNA
  misc_feature 3..4: note = RNA
  misc_feature 6: note = RNA
  misc_feature 8..11: note = RNA
  misc_feature 13..23: note = RNA
  misc_feature 2: note = DNA
  misc_feature 5: note = DNA
  misc_feature 7: note = DNA
  misc_feature 12: note = DNA
taattgtagagaacggctcggat

SEQ ID NO: 453 - DNA, 23 bp, synthetic construct
  source 1..23: mol_type = other DNA
  modified_base 1: mod_base = OTHER; note = 2'-O-methyladenosine-3'-phosphorothioate
  modified_base 2: mod_base = OTHER; note = 2'-deoxyadenosine-3'-phosphorothioate
  modified_base 3: mod_base = OTHER; note = 2'-O-methyladenosine-3'-phosphate
  modified_base 4: mod_base = OTHER; note = 2'-O-methyluridine-3'-phosphate
  modified_base 6: mod_base = OTHER; note = 2'-O-methylguanosine-3'-phosphate
  modified_base 8: mod_base = OTHER; note = 2'-O-methyladenosine-3'-phosphate
  modified_base 9: mod_base = OTHER; note = 2'-O-methylguanosine-3'-phosphate
  modified_base 10: mod_base = OTHER; note = 2'-O-methyladenosine-3'-phosphate
  modified_base 11: mod_base = OTHER; note = 2'-O-methylguanosine-3'-phosphate
  modified_base 13: mod_base = OTHER; note = 2'-O-methyladenosine-3'-phosphate
  modified_base 14: mod_base = OTHER; note = 2'-deoxy-2'-fluorocytidine-3'-phosphate
  modified_base 15: mod_base = OTHER; note = 2'-O-methylguanosine-3'-phosphate
  modified_base 16: mod_base = OTHER; note = 2'-O-methylguanosine-3'-phosphate
  modified_base 17: mod_base = OTHER; note = 2'-O-methylcytidine-3'-phosphate
  modified_base 18: mod_base = OTHER; note = 2'-O-methyluridine-3'-phosphate
  modified_base 19: mod_base = OTHER; note = 2'-O-methylcytidine-3'-phosphate
  modified_base 20: mod_base = OTHER; note = 2'-O-methylguanosine-3'-phosphate
  modified_base 21: mod_base = OTHER; note = 2'-O-methylguanosine-3'-phosphorothioate
  modified_base 22: mod_base = OTHER; note = 2'-O-methylguanosine-3'-phosphorothioate
  modified_base 23: mod_base = OTHER; note = 2'-O-methyluridine
  misc_feature 1: note = RNA
  misc_feature 3..4: note = RNA
  misc_feature 6: note = RNA
  misc_feature 8..11: note = RNA
  misc_feature 13..23: note = RNA
  misc_feature 2: note = DNA
  misc_feature 5: note = DNA
  misc_feature 7: note = DNA
  misc_feature 12: note = DNA
aaattgtagagaacggctcgggt

SEQ ID NO: 454 - DNA, 21 bp, synthetic construct
  source 1..21: mol_type = other DNA
  modified_base 1: mod_base = OTHER; note = 2'-O-methyladenosine-3'-phosphorothioate
  modified_base 2: mod_base = OTHER; note = 2'-deoxyadenosine-3'-phosphorothioate
  modified_base 3: mod_base = OTHER; note = 2'-O-methyladenosine-3'-phosphate
  modified_base 4: mod_base = OTHER; note = 2'-O-methyluridine-3'-phosphate
  modified_base 6: mod_base = OTHER; note = 2'-O-methylguanosine-3'-phosphate
  modified_base 8: mod_base = OTHER; note = 2'-O-methyladenosine-3'-phosphate
  modified_base 9: mod_base = OTHER; note = 2'-O-methylguanosine-3'-phosphate
  modified_base 10: mod_base = OTHER; note = 2'-O-methyladenosine-3'-phosphate
  modified_base 11: mod_base = OTHER; note = 2'-O-methylguanosine-3'-phosphate
  modified_base 13: mod_base = OTHER; note = 2'-O-methyladenosine-3'-phosphate
  modified_base 14: mod_base = OTHER; note = 2'-deoxy-2'-fluorocytidine-3'-phosphate
  modified_base 15: mod_base = OTHER; note = 2'-O-methylguanosine-3'-phosphate
  modified_base 16: mod_base = OTHER; note = 2'-O-methylguanosine-3'-phosphate
  modified_base 17: mod_base = OTHER; note = 2'-O-methylcytidine-3'-phosphate
  modified_base 18: mod_base = OTHER; note = 2'-O-methyluridine-3'-phosphate
  modified_base 19: mod_base = OTHER; note = 2'-O-methylcytidine-3'-phosphorothioate
  modified_base 20: mod_base = OTHER; note = 2'-O-methylguanosine-3'-phosphorothioate
  modified_base 21: mod_base = OTHER; note = 2'-O-methylguanosine
  misc_feature 1: note = RNA
  misc_feature 3..4: note = RNA
  misc_feature 6: note = RNA
  misc_feature 8..11: note = RNA
  misc_feature 13..21: note = RNA
  misc_feature 2: note = DNA
  misc_feature 5: note = DNA
  misc_feature 7: note = DNA
  misc_feature 12: note = DNA
aaattgtagagaacggctcgg

SEQ ID NO: 455 - DNA, 23 bp, synthetic construct
  source 1..23: mol_type = other DNA
  modified_base 1: mod_base = OTHER; note = 2'-O-methyladenosine-3'-phosphorothioate
  modified_base 2: mod_base = OTHER; note = 2'-deoxyadenosine-3'-phosphorothioate
  modified_base 3: mod_base = OTHER; note = 2'-O-methyladenosine-3'-phosphate
  modified_base 4: mod_base = OTHER; note = 2'-O-methyluridine-3'-phosphate
  modified_base 6: mod_base = OTHER; note = 2'-O-methylguanosine-3'-phosphate
  modified_base 8: mod_base = OTHER; note = 2'-O-methyladenosine-3'-phosphate
  modified_base 9: mod_base = OTHER; note = 2'-O-methylguanosine-3'-phosphate
  modified_base 10: mod_base = OTHER; note = 2'-O-methyladenosine-3'-phosphate
  modified_base 11: mod_base = OTHER; note = 2'-O-methylguanosine-3'-phosphate
  modified_base 13: mod_base = OTHER; note = 2'-O-methyladenosine-3'-phosphate
  modified_base 14: mod_base = OTHER; note = 2'-deoxy-2'-fluorocytidine-3'-phosphate
  modified_base 15: mod_base = OTHER; note = 2'-O-methylguanosine-3'-phosphate
  modified_base 16: mod_base = OTHER; note = 2'-O-methylguanosine-3'-phosphate
  modified_base 17: mod_base = OTHER; note = 2'-O-methylguanosine-3'-phosphate
  modified_base 18: mod_base = OTHER; note = 2'-O-methyluridine-3'-phosphate
  modified_base 19: mod_base = OTHER; note = 2'-O-methylcytidine-3'-phosphate
  modified_base 20: mod_base = OTHER; note = 2'-O-methylguanosine-3'-phosphate
  modified_base 21: mod_base = OTHER; note = 2'-O-methylguanosine-3'-phosphorothioate
  modified_base 22: mod_base = OTHER; note = 2'-O-methyladenosine-3'-phosphorothioate
  modified_base 23: mod_base = OTHER; note = 2'-O-methyluridine
  misc_feature 1: note = RNA
  misc_feature 3..4: note = RNA
  misc_feature 6: note = RNA
  misc_feature 8..11: note = RNA
  misc_feature 13..23: note = RNA
  misc_feature 2: note = DNA
  misc_feature 5: note = DNA
  misc_feature 7: note = DNA
  misc_feature 12: note = DNA
aaattgtagagaacgggtcggat

SEQ ID NO: 456 - DNA, 23 bp, synthetic construct
  source 1..23: mol_type = other DNA
  modified_base 1: mod_base = OTHER; note = 2'-O-methyladenosine-3'-phosphorothioate
  modified_base 2: mod_base = OTHER; note = 2'-deoxyadenosine-3'-phosphorothioate
  modified_base 3: mod_base = OTHER; note = 2'-O-methyladenosine-3'-phosphate
  modified_base 4: mod_base = OTHER; note = 2'-O-methyluridine-3'-phosphate
  modified_base 6: mod_base = OTHER; note = 2'-O-methylguanosine-3'-phosphate
  modified_base 8: mod_base = OTHER; note = 2'-O-methyladenosine-3'-phosphate
  modified_base 9: mod_base = OTHER; note = 2'-O-methylguanosine-3'-phosphate
  modified_base 10: mod_base = OTHER; note = 2'-O-methyladenosine-3'-phosphate
  modified_base 11: mod_base = OTHER; note = 2'-O-methylguanosine-3'-phosphate
  modified_base 13: mod_base = OTHER; note = 2'-O-methyladenosine-3'-phosphate
  modified_base 14: mod_base = OTHER; note = 2'-deoxy-2'-fluorocytidine-3'-phosphate
  modified_base 15: mod_base = OTHER; note = 2'-O-methylguanosine-3'-phosphate
  modified_base 16: mod_base = OTHER; note = 2'-O-methylguanosine-3'-phosphate
  modified_base 17: mod_base = OTHER; note = 2'-O-methylcytidine-3'-phosphate
  modified_base 18: mod_base = OTHER; note = 2'-O-methyladenosine-3'-phosphate
  modified_base 19: mod_base = OTHER; note = 2'-O-methylcytidine-3'-phosphate
  modified_base 20: mod_base = OTHER; note = 2'-O-methylguanosine-3'-phosphate
  modified_base 21: mod_base = OTHER; note = 2'-O-methylguanosine-3'-phosphorothioate
  modified_base 22: mod_base = OTHER; note = 2'-O-methyladenosine-3'-phosphorothioate
  modified_base 23: mod_base = OTHER; note = 2'-O-methyluridine
  misc_feature 1: note = RNA
  misc_feature 3..4: note = RNA
  misc_feature 6: note = RNA
  misc_feature 8..11: note = RNA
  misc_feature 13..23: note = RNA
  misc_feature 2: note = DNA
  misc_feature 5: note = DNA
  misc_feature 7: note = DNA
  misc_feature 12: note = DNA
aaattgtagagaacggcacggat

SEQ ID NO: 457 - DNA, 23 bp, synthetic construct
  source 1..23: mol_type = other DNA
  modified_base 1: mod_base = OTHER; note = 2'-O-methyladenosine-3'-phosphorothioate
  modified_base 2: mod_base = OTHER; note = 2'-deoxyadenosine-3'-phosphorothioate
  modified_base 3: mod_base = OTHER; note = 2'-O-methyladenosine-3'-phosphate
  modified_base 4: mod_base = OTHER; note = 2'-O-methyluridine-3'-phosphate
  modified_base 6: mod_base = OTHER; note = 2'-O-methylguanosine-3'-phosphate
  modified_base 8: mod_base = OTHER; note = 2'-O-methyladenosine-3'-phosphate
  modified_base 9: mod_base = OTHER; note = 2'-O-methylguanosine-3'-phosphate
  modified_base 10: mod_base = OTHER; note = 2'-O-methyladenosine-3'-phosphate
  modified_base 11: mod_base = OTHER; note = 2'-O-methylguanosine-3'-phosphate
  modified_base 13: mod_base = OTHER; note = 2'-O-methyladenosine-3'-phosphate
  modified_base 14: mod_base = OTHER; note = 2'-deoxy-2'-fluorocytidine-3'-phosphate
  modified_base 15: mod_base = OTHER; note = 2'-O-methylguanosine-3'-phosphate
  modified_base 16: mod_base = OTHER; note = 2'-O-methylguanosine-3'-phosphate
  modified_base 17: mod_base = OTHER; note = 2'-O-methylcytidine-3'-phosphate
  modified_base 18: mod_base = OTHER; note = 2'-O-methyluridine-3'-phosphate
  modified_base 19: mod_base = OTHER; note = 2'-O-methylguanosine-3'-phosphate
  modified_base 20: mod_base = OTHER; note = 2'-O-methylguanosine-3'-phosphate
  modified_base 21: mod_base = OTHER; note = 2'-O-methylguanosine-3'-phosphorothioate
  modified_base 22: mod_base = OTHER; note = 2'-O-methyladenosine-3'-phosphorothioate
  modified_base 23: mod_base = OTHER; note = 2'-O-methyluridine
  misc_feature 1: note = RNA
  misc_feature 3..4: note = RNA
  misc_feature 6: note = RNA
  misc_feature 8..11: note = RNA
  misc_feature 13..23: note = RNA
  misc_feature 2: note = DNA
  misc_feature 5: note = DNA
  misc_feature 7: note = DNA
  misc_feature 12: note = DNA
aaattgtagagaacggctgggat

SEQ ID NO: 458 - DNA, 23 bp, synthetic construct
  source 1..23: mol_type = other DNA
  modified_base 1: mod_base = OTHER; note = 2'-O-methyladenosine-3'-phosphorothioate
  modified_base 2: mod_base = OTHER; note = 2'-deoxyadenosine-3'-phosphorothioate
  modified_base 3: mod_base = OTHER; note = 2'-O-methyladenosine-3'-phosphate
  modified_base 4: mod_base = OTHER; note = 2'-O-methyluridine-3'-phosphate
  modified_base 6: mod_base = OTHER; note = 2'-O-methylguanosine-3'-phosphate
  modified_base 8: mod_base = OTHER; note = 2'-O-methyladenosine-3'-phosphate
  modified_base 9: mod_base = OTHER; note = 2'-O-methylguanosine-3'-phosphate
  modified_base 10: mod_base = OTHER; note = 2'-O-methyladenosine-3'-phosphate
  modified_base 11: mod_base = OTHER; note = 2'-O-methylguanosine-3'-phosphate
  modified_base 13: mod_base = OTHER; note = 2'-O-methyladenosine-3'-phosphate
  modified_base 14: mod_base = OTHER; note = 2'-deoxy-2'-fluorocytidine-3'-phosphate
  modified_base 15: mod_base = OTHER; note = 2'-O-methylguanosine-3'-phosphate
  modified_base 16: mod_base = OTHER; note = 2'-O-methylguanosine-3'-phosphate
  modified_base 17: mod_base = OTHER; note = 2'-O-methylguanosine-3'-phosphate
  modified_base 18: mod_base = OTHER; note = 2'-O-methyluridine-3'-phosphate
  modified_base 19: mod_base = OTHER; note = 2'-O-methylcytidine-3'-phosphate
  modified_base 20: mod_base = OTHER; note = 2'-O-methylguanosine-3'-phosphate
  modified_base 21: mod_base = OTHER; note = 2'-O-methylguanosine-3'-phosphorothioate
  modified_base 22: mod_base = OTHER; note = 2'-O-methylguanosine-3'-phosphorothioate
  modified_base 23: mod_base = OTHER; note = 2'-O-methyluridine
  misc_feature 1: note = RNA
  misc_feature 3..4: note = RNA
  misc_feature 6: note = RNA
  misc_feature 8..11: note = RNA
  misc_feature 13..23: note = RNA
  misc_feature 2: note = DNA
  misc_feature 5: note = DNA
  misc_feature 7: note = DNA
  misc_feature 12: note = DNA
aaattgtagagaacgggtcgggt

SEQ ID NO: 459 - DNA, 23 bp, synthetic construct
  source 1..23: mol_type = other DNA
  modified_base 1: mod_base = OTHER; note = 2'-O-methyladenosine-3'-phosphorothioate
  modified_base 2: mod_base = OTHER; note = 2'-deoxyadenosine-3'-phosphorothioate
  modified_base 3: mod_base = OTHER; note = 2'-O-methyladenosine-3'-phosphate
  modified_base 4: mod_base = OTHER; note = 2'-O-methyluridine-3'-phosphate
  modified_base 6: mod_base = OTHER; note = 2'-O-methylguanosine-3'-phosphate
  modified_base 8: mod_base = OTHER; note = 2'-O-methyladenosine-3'-phosphate
  modified_base 9: mod_base = OTHER; note = 2'-O-methylguanosine-3'-phosphate
  modified_base 10: mod_base = OTHER; note = 2'-O-methyladenosine-3'-phosphate
  modified_base 11: mod_base = OTHER; note = 2'-O-methylguanosine-3'-phosphate
  modified_base 13: mod_base = OTHER; note = 2'-O-methyladenosine-3'-phosphate
  modified_base 14: mod_base = OTHER; note = 2'-deoxy-2'-fluorocytidine-3'-phosphate
  modified_base 15: mod_base = OTHER; note = 2'-O-methylguanosine-3'-phosphate
  modified_base 16: mod_base = OTHER; note = 2'-O-methylguanosine-3'-phosphate
  modified_base 17: mod_base = OTHER; note = 2'-O-methylcytidine-3'-phosphate
  modified_base 18: mod_base = OTHER; note = 2'-O-methyladenosine-3'-phosphate
  modified_base 19: mod_base = OTHER; note = 2'-O-methylcytidine-3'-phosphate
  modified_base 20: mod_base = OTHER; note = 2'-O-methylguanosine-3'-phosphate
  modified_base 21: mod_base = OTHER; note = 2'-O-methylguanosine-3'-phosphorothioate
  modified_base 22: mod_base = OTHER; note = 2'-O-methylguanosine-3'-phosphorothioate
  modified_base 23: mod_base = OTHER; note = 2'-O-methyluridine
  misc_feature 1: note = RNA
  misc_feature 3..4: note = RNA
  misc_feature 6: note = RNA
  misc_feature 8..11: note = RNA
  misc_feature 13..23: note = RNA
  misc_feature 2: note = DNA
  misc_feature 5: note = DNA
  misc_feature 7: note = DNA
  misc_feature 12: note = DNA
aaattgtagagaacggcacgggt

SEQ ID NO: 460 - DNA, 23 bp, synthetic construct
  source 1..23: mol_type = other DNA
  modified_base 1: mod_base = OTHER; note = 2'-O-methyladenosine-3'-phosphorothioate
  modified_base 2: mod_base = OTHER; note = 2'-deoxyadenosine-3'-phosphorothioate
  modified_base 3: mod_base = OTHER; note = 2'-O-methyladenosine-3'-phosphate
  modified_base 4: mod_base = OTHER; note = 2'-O-methyluridine-3'-phosphate
  modified_base 6: mod_base = OTHER; note = 2'-O-methylguanosine-3'-phosphate
  modified_base 8: mod_base = OTHER; note = 2'-O-methyladenosine-3'-phosphate
  modified_base 9: mod_base = OTHER; note = 2'-O-methylguanosine-3'-phosphate
  modified_base 10: mod_base = OTHER; note = 2'-O-methyladenosine-3'-phosphate
  modified_base 11: mod_base = OTHER; note = 2'-O-methylguanosine-3'-phosphate
  modified_base 13: mod_base = OTHER; note = 2'-O-methyladenosine-3'-phosphate
  modified_base 14: mod_base = OTHER; note = 2'-deoxy-2'-fluorocytidine-3'-phosphate
  modified_base 15: mod_base = OTHER; note = 2'-O-methylguanosine-3'-phosphate
  modified_base 16: mod_base = OTHER; note = 2'-O-methylguanosine-3'-phosphate
  modified_base 17: mod_base = OTHER; note = 2'-O-methylcytidine-3'-phosphate
  modified_base 18: mod_base = OTHER; note = 2'-O-methyluridine-3'-phosphate
  modified_base 19: mod_base = OTHER; note = 2'-O-methylguanosine-3'-phosphate
  modified_base 20: mod_base = OTHER; note = 2'-O-methylguanosine-3'-phosphate
  modified_base 21: mod_base = OTHER; note = 2'-O-methylguanosine-3'-phosphorothioate
  modified_base 22: mod_base = OTHER; note = 2'-O-methylguanosine-3'-phosphorothioate
  modified_base 23: mod_base = OTHER; note = 2'-O-methyluridine
  misc_feature 1: note = RNA
  misc_feature 3..4: note = RNA
  misc_feature 6: note = RNA
  misc_feature 8..11: note = RNA
  misc_feature 13..23: note = RNA
  misc_feature 2: note = DNA
  misc_feature 5: note = DNA
  misc_feature 7: note = DNA
  misc_feature 12: note = DNA
aaattgtagagaacggctggggt

SEQ ID NO: 461 - DNA, 21 bp, synthetic construct
  source 1..21: mol_type = other DNA
  modified_base 1: mod_base = OTHER; note = 2'-O-methyladenosine-3'-phosphorothioate
  modified_base 2: mod_base = OTHER; note = 2'-deoxyadenosine-3'-phosphorothioate
  modified_base 3: mod_base = OTHER; note = 2'-O-methyladenosine-3'-phosphate
  modified_base 4: mod_base = OTHER; note = 2'-O-methyluridine-3'-phosphate
  modified_base 6: mod_base = OTHER; note = 2'-O-methylguanosine-3'-phosphate
  modified_base 8: mod_base = OTHER; note = 2'-O-methyladenosine-3'-phosphate
  modified_base 9: mod_base = OTHER; note = 2'-O-methylguanosine-3'-phosphate
  modified_base 10: mod_base = OTHER; note = 2'-O-methyladenosine-3'-phosphate
  modified_base 11: mod_base = OTHER; note = 2'-O-methylguanosine-3'-phosphate
  modified_base 13: mod_base = OTHER; note = 2'-O-methyladenosine-3'-phosphate
  modified_base 14: mod_base = OTHER; note = 2'-deoxy-2'-fluorocytidine-3'-phosphate
  modified_base 15: mod_base = OTHER; note = 2'-O-methylguanosine-3'-phosphate
  modified_base 16: mod_base = OTHER; note = 2'-O-methylguanosine-3'-phosphate
  modified_base 17: mod_base = OTHER; note = 2'-O-methylguanosine-3'-phosphate
  modified_base 18: mod_base = OTHER; note = 2'-O-methyluridine-3'-phosphate
  modified_base 19: mod_base = OTHER; note = 2'-O-methylcytidine-3'-phosphorothioate
  modified_base 20: mod_base = OTHER; note = 2'-O-methylguanosine-3'-phosphorothioate
  modified_base 21: mod_base = OTHER; note = 2'-O-methylguanosine
  misc_feature 1: note = RNA
  misc_feature 3..4: note = RNA
  misc_feature 6: note = RNA
  misc_feature 8..11: note = RNA
  misc_feature 13..21: note = RNA
  misc_feature 2: note = DNA
  misc_feature 5: note = DNA
  misc_feature 7: note = DNA
  misc_feature 12: note = DNA
aaattgtagagaacgggtcgg

SEQ ID NO: 462 - DNA, 21 bp, synthetic construct
  source 1..21: mol_type = other DNA
  modified_base 1: mod_base = OTHER; note = 2'-O-methyladenosine-3'-phosphorothioate
  modified_base 2: mod_base = OTHER; note = 2'-deoxyadenosine-3'-phosphorothioate
  modified_base 3: mod_base = OTHER; note = 2'-O-methyladenosine-3'-phosphate
  modified_base 4: mod_base = OTHER; note = 2'-O-methyluridine-3'-phosphate
  modified_base 6: mod_base = OTHER; note = 2'-O-methylguanosine-3'-phosphate
  modified_base 8: mod_base = OTHER; note = 2'-O-methyladenosine-3'-phosphate
  modified_base 9: mod_base = OTHER; note = 2'-O-methylguanosine-3'-phosphate
  modified_base 10: mod_base = OTHER; note = 2'-O-methyladenosine-3'-phosphate
  modified_base 11: mod_base = OTHER; note = 2'-O-methylguanosine-3'-phosphate
  modified_base 13: mod_base = OTHER; note = 2'-O-methyladenosine-3'-phosphate
  modified_base 14: mod_base = OTHER; note = 2'-deoxy-2'-fluorocytidine-3'-phosphate
  modified_base 15: mod_base = OTHER; note = 2'-O-methylguanosine-3'-phosphate
  modified_base 16: mod_base = OTHER; note = 2'-O-methylguanosine-3'-phosphate
  modified_base 17: mod_base = OTHER; note = 2'-O-methylcytidine-3'-phosphate
  modified_base 18: mod_base = OTHER; note = 2'-O-methyladenosine-3'-phosphate
  modified_base 19: mod_base = OTHER; note = 2'-O-methylcytidine-3'-phosphorothioate
  modified_base 20: mod_base = OTHER; note = 2'-O-methylguanosine-3'-phosphorothioate
  modified_base 21: mod_base = OTHER; note = 2'-O-methylguanosine
  misc_feature 1: note = RNA
  misc_feature 3..4: note = RNA
  misc_feature 6: note = RNA
  misc_feature 8..11: note = RNA
  misc_feature 13..21: note = RNA
  misc_feature 2: note = DNA
  misc_feature 5: note = DNA
  misc_feature 7: note = DNA
  misc_feature 12: note = DNA
aaattgtagagaacggcacgg

SEQ ID NO: 463 - DNA, 21 bp, synthetic construct
  source 1..21: mol_type = other DNA
  modified_base 1: mod_base = OTHER; note = 2'-O-methyladenosine-3'-phosphorothioate
  modified_base 2: mod_base = OTHER; note = 2'-deoxyadenosine-3'-phosphorothioate
  modified_base 3: mod_base = OTHER; note = 2'-O-methyladenosine-3'-phosphate
  modified_base 4: mod_base = OTHER; note = 2'-O-methyluridine-3'-phosphate
  modified_base 6: mod_base = OTHER; note = 2'-O-methylguanosine-3'-phosphate
  modified_base 8: mod_base = OTHER; note = 2'-O-methyladenosine-3'-phosphate
  modified_base 9: mod_base = OTHER; note = 2'-O-methylguanosine-3'-phosphate
  modified_base 10: mod_base = OTHER; note = 2'-O-methyladenosine-3'-phosphate
  modified_base 11: mod_base = OTHER; note = 2'-O-methylguanosine-3'-phosphate
  modified_base 13: mod_base = OTHER; note = 2'-O-methyladenosine-3'-phosphate
  modified_base 14: mod_base = OTHER; note = 2'-deoxy-2'-fluorocytidine-3'-phosphate
  modified_base 15: mod_base = OTHER; note = 2'-O-methylguanosine-3'-phosphate
  modified_base 16: mod_base = OTHER; note = 2'-O-methylguanosine-3'-phosphate
  modified_base 17: mod_base = OTHER; note = 2'-O-methylcytidine-3'-phosphate
  modified_base 18: mod_base = OTHER; note = 2'-O-methyluridine-3'-phosphate
  modified_base 19: mod_base = OTHER; note = 2'-O-methylguanosine-3'-phosphorothioate
  modified_base 20: mod_base = OTHER; note = 2'-O-methylguanosine-3'-phosphorothioate
  modified_base 21: mod_base = OTHER; note = 2'-O-methylguanosine
  misc_feature 1: note = RNA
  misc_feature 3..4: note = RNA
  misc_feature 6: note = RNA
  misc_feature 8..11: note = RNA
  misc_feature 13..21: note = RNA
  misc_feature 2: note = DNA
  misc_feature 5: note = DNA
  misc_feature 7: note = DNA
  misc_feature 12: note = DNA
aaattgtagagaacggctggg

SEQ ID NO: 464 - DNA, 23 bp, synthetic construct
  source 1..23: mol_type = other DNA
  modified_base 1: mod_base = OTHER; note = 2'-O-methyladenosine-3'-phosphorothioate
  modified_base 2: mod_base = OTHER; note = 2'-deoxyadenosine-3'-phosphorothioate
  modified_base 3: mod_base = OTHER; note = 2'-O-methyladenosine-3'-phosphate
  modified_base 4: mod_base = OTHER; note = 2'-O-methyluridine-3'-phosphate
  modified_base 6: mod_base = OTHER; note = 2'-O-methylguanosine-3'-phosphate
  modified_base 7: mod_base = OTHER; note = uridine-2'-phosphate
  modified_base 8: mod_base = OTHER; note = 2'-O-methyladenosine-3'-phosphate
  modified_base 9: mod_base = OTHER; note = 2'-O-methylguanosine-3'-phosphate
  modified_base 10: mod_base = OTHER; note = 2'-O-methyladenosine-3'-phosphate
  modified_base 11: mod_base = OTHER; note = 2'-O-methylguanosine-3'-phosphate
  modified_base 13: mod_base = OTHER; note = 2'-O-methyladenosine-3'-phosphate
  modified_base 14: mod_base = OTHER; note = 2'-deoxy-2'-fluorocytidine-3'-phosphate
  modified_base 15: mod_base = OTHER; note = 2'-O-methylguanosine-3'-phosphate
  modified_base 16: mod_base = OTHER; note = 2'-deoxy-2'-fluoroguanosine-3'-phosphate
  modified_base 17: mod_base = OTHER; note = 2'-O-methylcytidine-3'-phosphate
  modified_base 18: mod_base = OTHER; note = 2'-O-methyluridine-3'-phosphate
  modified_base 19: mod_base = OTHER; note = 2'-O-methylcytidine-3'-phosphate
  modified_base 20: mod_base = OTHER; note = 2'-O-methylguanosine-3'-phosphate
  modified_base 21: mod_base = OTHER; note = 2'-O-methylguanosine-3'-phosphorothioate
  modified_base 22: mod_base = OTHER; note = 2'-O-methyladenosine-3'-phosphorothioate
  modified_base 23: mod_base = OTHER; note = 2'-O-methyluridine
  misc_feature 1: note = RNA
  misc_feature 3..4: note = RNA
  misc_feature 6..11: note = RNA
  misc_feature 13..23: note = RNA
  misc_feature 2: note = DNA
  misc_feature 5: note = DNA
  misc_feature 12: note = DNA
aaattgtagagaacggctcggat

SEQ ID NO: 465 - DNA, 23 bp, synthetic construct
  source 1..23: mol_type = other DNA
  modified_base 1: mod_base = OTHER; note = 2'-O-methyladenosine-3'-phosphorothioate
  modified_base 2: mod_base = OTHER; note = 2'-deoxythymidine-3'-phosphorothioate
  modified_base 3: mod_base = OTHER; note = 2'-O-methyladenosine-3'-phosphate
  modified_base 4: mod_base = OTHER; note = 2'-O-methyladenosine-3'-phosphate
  modified_base 6: mod_base = OTHER; note = 2'-O-methyluridine-3'-phosphate
  modified_base 8: mod_base = OTHER; note = 2'-O-methyluridine-3'-phosphate
  modified_base 9: mod_base = OTHER; note = 2'-O-methyladenosine-3'-phosphate
  modified_base 10: mod_base = OTHER; note = 2'-O-methylguanosine-3'-phosphate
  modified_base 11: mod_base = OTHER; note = 2'-O-methyladenosine-3'-phosphate
  modified_base 13: mod_base = OTHER; note = 2'-O-methyladenosine-3'-phosphate
  modified_base 14: mod_base = OTHER; note = 2'-deoxy-2'-fluoroadenosine-3'-phosphate
  modified_base 15: mod_base = OTHER; note = 2'-O-methylcytidine-3'-phosphate
  modified_base 16: mod_base = OTHER; note = 2'-O-methylguanosine-3'-phosphate
  modified_base 17: mod_base = OTHER; note = 2'-O-methylguanosine-3'-phosphate
  modified_base 18: mod_base = OTHER; note = 2'-O-methylcytidine-3'-phosphate
  modified_base 19: mod_base = OTHER; note = 2'-O-methyluridine-3'-phosphate
  modified_base 20: mod_base = OTHER; note = 2'-O-methylcytidine-3'-phosphate
  modified_base 21: mod_base = OTHER; note = 2'-O-methylguanosine-3'-phosphorothioate
  modified_base 22: mod_base = OTHER; note = 2'-O-methylguanosine-3'-phosphorothioate
  modified_base 23: mod_base = OTHER; note = 2'-O-methyladenosine
  misc_feature 1: note = RNA
  misc_feature 3..4: note = RNA
  misc_feature 6: note = RNA
  misc_feature 8..11: note = RNA
  misc_feature 13..23: note = RNA
  misc_feature 2: note = DNA
  misc_feature 5: note = DNA
  misc_feature 7: note = DNA
  misc_feature 12: note = DNA
ataattgtagagaacggctcgga

SEQ ID NO: 466 - DNA, 23 bp, synthetic construct
  source 1..23: mol_type = other DNA
  modified_base 1: mod_base = OTHER; note = 2'-O-methyluridine-3'-phosphorothioate
  modified_base 2: mod_base = OTHER; note = 2'-deoxythymidine-3'-phosphorothioate
  modified_base 3: mod_base = OTHER; note = 2'-O-methyladenosine-3'-phosphate
  modified_base 4: mod_base = OTHER; note = 2'-O-methyladenosine-3'-phosphate
  modified_base 6: mod_base = OTHER; note = 2'-O-methyluridine-3'-phosphate
  modified_base 8: mod_base = OTHER; note = 2'-O-methyluridine-3'-phosphate
  modified_base 9: mod_base = OTHER; note = 2'-O-methyladenosine-3'-phosphate
  modified_base 10: mod_base = OTHER; note = 2'-O-methylguanosine-3'-phosphate
  modified_base 11: mod_base = OTHER; note = 2'-O-methyladenosine-3'-phosphate
  modified_base 13: mod_base = OTHER; note = 2'-O-methyladenosine-3'-phosphate
  modified_base 14: mod_base = OTHER; note = 2'-deoxy-2'-fluoroadenosine-3'-phosphate
  modified_base 15: mod_base = OTHER; note = 2'-O-methylcytidine-3'-phosphate
  modified_base 16: mod_base = OTHER; note = 2'-O-methylguanosine-3'-phosphate
  modified_base 17: mod_base = OTHER; note = 2'-O-methylguanosine-3'-phosphate
  modified_base 18: mod_base = OTHER; note = 2'-O-methylcytidine-3'-phosphate
  modified_base 19: mod_base = OTHER; note = 2'-O-methyluridine-3'-phosphate
  modified_base 20: mod_base = OTHER; note = 2'-O-methylcytidine-3'-phosphate
  modified_base 21: mod_base = OTHER; note = 2'-O-methylguanosine-3'-phosphorothioate
  modified_base 22: mod_base = OTHER; note = 2'-O-methylguanosine-3'-phosphorothioate
  modified_base 23: mod_base = OTHER; note = 2'-O-methyladenosine
  misc_feature 1: note = RNA
  misc_feature 3..4: note = RNA
  misc_feature 6: note = RNA
  misc_feature 8..11: note = RNA
  misc_feature 13..23: note = RNA
  misc_feature 2: note = DNA
  misc_feature 5: note = DNA
  misc_feature 7: note = DNA
  misc_feature 12: note = DNA
ttaattgtagagaacggctcgga

SEQ ID NO: 467 - DNA, 23 bp, synthetic construct
  source 1..23: mol_type = other DNA
  modified_base 1: mod_base = OTHER; note = 2'-O-methyladenosine-3'-phosphorothioate
  modified_base 2: mod_base = OTHER; note = 2'-deoxythymidine-3'-phosphorothioate
  modified_base 3: mod_base = OTHER; note = 2'-O-methyladenosine-3'-phosphate
  modified_base 4: mod_base = OTHER; note = 2'-O-methyladenosine-3'-phosphate
  modified_base 6: mod_base = OTHER; note = 2'-O-methyluridine-3'-phosphate
  modified_base 8: mod_base = OTHER; note = 2'-O-methyluridine-3'-phosphate
  modified_base 9: mod_base = OTHER; note = 2'-O-methyladenosine-3'-phosphate
  modified_base 10: mod_base = OTHER; note = 2'-O-methylguanosine-3'-phosphate
  modified_base 11: mod_base = OTHER; note = 2'-O-methyladenosine-3'-phosphate
  modified_base 13: mod_base = OTHER; note = 2'-O-methyladenosine-3'-phosphate
  modified_base 14: mod_base = OTHER; note = 2'-deoxy-2'-fluoroadenosine-3'-phosphate
  modified_base 15: mod_base = OTHER; note = 2'-O-methylcytidine-3'-phosphate
  modified_base 16: mod_base = OTHER; note = 2'-O-methylguanosine-3'-phosphate
  modified_base 17: mod_base = OTHER; note = 2'-O-methylguanosine-3'-phosphate
  modified_base 18: mod_base = OTHER; note = 2'-O-methylcytidine-3'-phosphate
  modified_base 19: mod_base = OTHER; note = 2'-O-methyluridine-3'-phosphate
  modified_base 20: mod_base = OTHER; note = 2'-O-methylcytidine-3'-phosphate
  modified_base 21: mod_base = OTHER; note = 2'-O-methylguanosine-3'-phosphorothioate
  modified_base 22: mod_base = OTHER; note = 2'-O-methylguanosine-3'-phosphorothioate
  modified_base 23: mod_base = OTHER; note = 2'-O-methylguanosine
  misc_feature 1: note = RNA
  misc_feature 3..4: note = RNA
  misc_feature 6: note = RNA
  misc_feature 8..11: note = RNA
  misc_feature 13..23: note = RNA
  misc_feature 2: note = DNA
  misc_feature 5: note = DNA
  misc_feature 7: note = DNA
  misc_feature 12: note = DNA
ataattgtagagaacggctcggg

SEQ ID NO: 468 - DNA, 21 bp, synthetic construct
  source 1..21: mol_type = other DNA
  modified_base 1: mod_base = OTHER; note = 2'-O-methyladenosine-3'-phosphorothioate
  modified_base 2: mod_base = OTHER; note = 2'-deoxythymidine-3'-phosphorothioate
  modified_base 3: mod_base = OTHER; note = 2'-O-methyladenosine-3'-phosphate
  modified_base 4: mod_base = OTHER; note = 2'-O-methyladenosine-3'-phosphate
  modified_base 6: mod_base = OTHER; note = 2'-O-methyluridine-3'-phosphate
  modified_base 8: mod_base = OTHER; note = 2'-O-methyluridine-3'-phosphate
  modified_base 9: mod_base = OTHER; note = 2'-O-methyladenosine-3'-phosphate
  modified_base 10: mod_base = OTHER; note = 2'-O-methylguanosine-3'-phosphate
  modified_base 11: mod_base = OTHER; note = 2'-O-methyladenosine-3'-phosphate
  modified_base 13: mod_base = OTHER; note = 2'-O-methyladenosine-3'-phosphate
  modified_base 14: mod_base = OTHER; note = 2'-deoxy-2'-fluoroadenosine-3'-phosphate
  modified_base 15: mod_base = OTHER; note = 2'-O-methylcytidine-3'-phosphate
  modified_base 16: mod_base = OTHER; note = 2'-O-methylguanosine-3'-phosphate
  modified_base 17: mod_base = OTHER; note = 2'-O-methylguanosine-3'-phosphate
  modified_base 18: mod_base = OTHER; note = 2'-O-methylcytidine-3'-phosphate
  modified_base 19: mod_base = OTHER; note = 2'-O-methyluridine-3'-phosphorothioate
  modified_base 20: mod_base = OTHER; note = 2'-O-methylcytidine-3'-phosphorothioate
  modified_base 21: mod_base = OTHER; note = 2'-O-methylguanosine
  misc_feature 1: note = RNA
  misc_feature 3..4: note = RNA
  misc_feature 6: note = RNA
  misc_feature 8..11: note = RNA
  misc_feature 13..21: note = RNA
  misc_feature 2: note = DNA
  misc_feature 5: note = DNA
  misc_feature 7: note = DNA
  misc_feature 12: note = DNA
ataattgtagagaacggctcg

SEQ ID NO: 469 - DNA, 23 bp, synthetic construct
  source 1..23: mol_type = other DNA
  modified_base 1: mod_base = OTHER; note = 2'-O-methyladenosine-3'-phosphorothioate
  modified_base 2: mod_base = OTHER; note = 2'-deoxythymidine-3'-phosphorothioate
  modified_base 3: mod_base = OTHER; note = 2'-O-methyladenosine-3'-phosphate
  modified_base 4: mod_base = OTHER; note = 2'-O-methyladenosine-3'-phosphate
  modified_base 6: mod_base = OTHER; note = 2'-O-methyluridine-3'-phosphate
  modified_base 8: mod_base = OTHER; note = 2'-O-methyluridine-3'-phosphate
  modified_base 9: mod_base = OTHER; note = 2'-O-methyladenosine-3'-phosphate
  modified_base 10: mod_base = OTHER; note = 2'-O-methylguanosine-3'-phosphate
  modified_base 11: mod_base = OTHER; note = 2'-O-methyladenosine-3'-phosphate
  modified_base 13: mod_base = OTHER; note = 2'-O-methyladenosine-3'-phosphate
  modified_base 14: mod_base = OTHER; note = 2'-deoxy-2'-fluoroadenosine-3'-phosphate
  modified_base 15: mod_base = OTHER; note = 2'-O-methylcytidine-3'-phosphate
  modified_base 16: mod_base = OTHER; note = 2'-O-methylguanosine-3'-phosphate
  modified_base 17: mod_base = OTHER; note = 2'-O-methylcytidine-3'-phosphate
  modified_base 18: mod_base = OTHER; note = 2'-O-methylcytidine-3'-phosphate
  modified_base 19: mod_base = OTHER; note = 2'-O-methyluridine-3'-phosphate
  modified_base 20: mod_base = OTHER; note = 2'-O-methylcytidine-3'-phosphate
  modified_base 21: mod_base = OTHER; note = 2'-O-methylguanosine-3'-phosphorothioate
  modified_base 22: mod_base = OTHER; note = 2'-O-methylguanosine-3'-phosphorothioate
  modified_base 23: mod_base = OTHER; note = 2'-O-methyladenosine
  misc_feature 1: note = RNA
  misc_feature 3..4: note = RNA
  misc_feature 6: note = RNA
  misc_feature 8..11: note = RNA
  misc_feature 13..23: note = RNA
  misc_feature 2: note = DNA
  misc_feature 5: note = DNA
  misc_feature 7: note = DNA
  misc_feature 12: note = DNA
ataattgtagagaacgcctcgga

SEQ ID NO: 470 - DNA, 23 bp, synthetic construct
  source 1..23: mol_type = other DNA
  modified_base 1: mod_base = OTHER; note = 2'-O-methyladenosine-3'-phosphorothioate
  modified_base 2: mod_base = OTHER; note = 2'-deoxythymidine-3'-phosphorothioate
  modified_base 3: mod_base = OTHER; note = 2'-O-methyladenosine-3'-phosphate
  modified_base 4: mod_base = OTHER; note = 2'-O-methyladenosine-3'-phosphate
  modified_base 6: mod_base = OTHER; note = 2'-O-methyluridine-3'-phosphate
  modified_base 8: mod_base = OTHER; note = 2'-O-methyluridine-3'-phosphate
  modified_base 9: mod_base = OTHER; note = 2'-O-methyladenosine-3'-phosphate
  modified_base 10: mod_base = OTHER; note = 2'-O-methylguanosine-3'-phosphate
  modified_base 11: mod_base = OTHER; note = 2'-O-methyladenosine-3'-phosphate
  modified_base 13: mod_base = OTHER; note = 2'-O-methyladenosine-3'-phosphate
  modified_base 14: mod_base = OTHER; note = 2'-deoxy-2'-fluoroadenosine-3'-phosphate
  modified_base 15: mod_base = OTHER; note = 2'-O-methylcytidine-3'-phosphate
  modified_base 16: mod_base = OTHER; note = 2'-O-methylguanosine-3'-phosphate
  modified_base 17: mod_base = OTHER; note = 2'-O-methylguanosine-3'-phosphate
  modified_base 18: mod_base = OTHER; note = 2'-O-methylguanosine-3'-phosphate
  modified_base 19: mod_base = OTHER; note = 2'-O-methyluridine-3'-phosphate
  modified_base 20: mod_base = OTHER; note = 2'-O-methylcytidine-3'-phosphate
  modified_base 21: mod_base = OTHER; note = 2'-O-methylguanosine-3'-phosphorothioate
  modified_base 22: mod_base = OTHER; note = 2'-O-methylguanosine-3'-phosphorothioate
  modified_base 23: mod_base = OTHER; note = 2'-O-methyladenosine
  misc_feature 1: note = RNA
  misc_feature 3..4: note = RNA
  misc_feature 6: note = RNA
  misc_feature 8..11: note = RNA
  misc_feature 13..23: note = RNA
  misc_feature 2: note = DNA
  misc_feature 5: note = DNA
  misc_feature 7: note = DNA
  misc_feature 12: note = DNA
ataattgtagagaacgggtcgga

SEQ ID NO: 471 - DNA, 23 bp, synthetic construct
  source 1..23: mol_type = other DNA
  modified_base 1: mod_base = OTHER; note = 2'-O-methyladenosine-3'-phosphorothioate
  modified_base 2: mod_base = OTHER; note = 2'-deoxythymidine-3'-phosphorothioate
  modified_base 3: mod_base = OTHER; note = 2'-O-methyladenosine-3'-phosphate
  modified_base 4: mod_base = OTHER; note = 2'-O-methyladenosine-3'-phosphate
  modified_base 6: mod_base = OTHER; note = 2'-O-methyluridine-3'-phosphate
  modified_base 8: mod_base = OTHER; note = 2'-O-methyluridine-3'-phosphate
  modified_base 9: mod_base = OTHER; note = 2'-O-methyladenosine-3'-phosphate
  modified_base 10: mod_base = OTHER; note = 2'-O-methylguanosine-3'-phosphate
  modified_base 11: mod_base = OTHER; note = 2'-O-methyladenosine-3'-phosphate
  modified_base 13: mod_base = OTHER; note = 2'-O-methyladenosine-3'-phosphate
  modified_base 14: mod_base = OTHER; note = 2'-deoxy-2'-fluoroadenosine-3'-phosphate
  modified_base 15: mod_base = OTHER; note = 2'-O-methylcytidine-3'-phosphate
  modified_base 16: mod_base = OTHER; note = 2'-O-methylguanosine-3'-phosphate
  modified_base 17: mod_base = OTHER; note = 2'-O-methylguanosine-3'-phosphate
  modified_base 18: mod_base = OTHER; note = 2'-O-methylcytidine-3'-phosphate
  modified_base 19: mod_base = OTHER; note = 2'-O-methyladenosine-3'-phosphate
  modified_base 20: mod_base = OTHER; note = 2'-O-methylcytidine-3'-phosphate
  modified_base 21: mod_base = OTHER; note = 2'-O-methylguanosine-3'-phosphorothioate
  modified_base 22: mod_base = OTHER; note = 2'-O-methylguanosine-3'-phosphorothioate
  modified_base 23: mod_base = OTHER; note = 2'-O-methyladenosine
  misc_feature 1: note = RNA
  misc_feature 3..4: note = RNA
  misc_feature 6: note = RNA
  misc_feature 8..11: note = RNA
  misc_feature 13..23: note = RNA
  misc_feature 2: note = DNA
  misc_feature 5: note = DNA
  misc_feature 7: note = DNA
  misc_feature 12: note = DNA
ataattgtagagaacggcacgga

SEQ ID NO: 472 - DNA, 23 bp, synthetic construct
  source 1..23: mol_type = other DNA
  modified_base 1: mod_base = OTHER; note = 2'-O-methyladenosine-3'-phosphorothioate
  modified_base 2: mod_base = OTHER; note = 2'-deoxythymidine-3'-phosphorothioate
  modified_base 3: mod_base = OTHER; note = 2'-O-methyladenosine-3'-phosphate
  modified_base 4: mod_base = OTHER; note = 2'-O-methyladenosine-3'-phosphate
  modified_base 6: mod_base = OTHER; note = 2'-O-methyluridine-3'-phosphate
  modified_base 8: mod_base = OTHER; note = 2'-O-methyluridine-3'-phosphate
  modified_base 9: mod_base = OTHER; note = 2'-O-methyladenosine-3'-phosphate
  modified_base 10: mod_base = OTHER; note = 2'-O-methylguanosine-3'-phosphate
  modified_base 11: mod_base = OTHER; note = 2'-O-methyladenosine-3'-phosphate
  modified_base 13: mod_base = OTHER; note = 2'-O-methyladenosine-3'-phosphate
  modified_base 14: mod_base = OTHER; note = 2'-deoxy-2'-fluoroadenosine-3'-phosphate
  modified_base 15: mod_base = OTHER; note = 2'-O-methylcytidine-3'-phosphate
  modified_base 16: mod_base = OTHER; note = 2'-O-methylguanosine-3'-phosphate
  modified_base 17: mod_base = OTHER; note = 2'-O-methylcytidine-3'-phosphate
  modified_base 18: mod_base = OTHER; note = 2'-O-methylcytidine-3'-phosphate
  modified_base 19: mod_base = OTHER; note = 2'-O-methyluridine-3'-phosphate
  modified_base 20: mod_base = OTHER; note = 2'-O-methylcytidine-3'-phosphate
  modified_base 21: mod_base = OTHER; note = 2'-O-methylguanosine-3'-phosphorothioate
  modified_base 22: mod_base = OTHER; note = 2'-O-methylguanosine-3'-phosphorothioate
  modified_base 23: mod_base = OTHER; note = 2'-O-methylguanosine
  misc_feature 1: note = RNA
  misc_feature 3..4: note = RNA
  misc_feature 6: note = RNA
  misc_feature 8..11: note = RNA
  misc_feature 13..23: note = RNA
  misc_feature 2: note = DNA
  misc_feature 5: note = DNA
  misc_feature 7: note = DNA
  misc_feature 12: note = DNA
ataattgtagagaacgcctcggg

SEQ ID NO: 473 - DNA, 23 bp, synthetic construct
  source 1..23: mol_type = other DNA
  modified_base 1: mod_base = OTHER; note = 2'-O-methyladenosine-3'-phosphorothioate
  modified_base 2: mod_base = OTHER; note = 2'-deoxythymidine-3'-phosphorothioate
  modified_base 3: mod_base = OTHER; note = 2'-O-methyladenosine-3'-phosphate
  modified_base 4: mod_base = OTHER; note = 2'-O-methyladenosine-3'-phosphate
  modified_base 6: mod_base = OTHER; note = 2'-O-methyluridine-3'-phosphate
  modified_base 8: mod_base = OTHER; note = 2'-O-methyluridine-3'-phosphate
  modified_base 9: mod_base = OTHER; note = 2'-O-methyladenosine-3'-phosphate
  modified_base 10: mod_base = OTHER; note = 2'-O-methylguanosine-3'-phosphate
  modified_base 11: mod_base = OTHER; note = 2'-O-methyladenosine-3'-phosphate
  modified_base 13: mod_base = OTHER; note = 2'-O-methyladenosine-3'-phosphate
  modified_base 14: mod_base = OTHER; note = 2'-deoxy-2'-fluoroadenosine-3'-phosphate
  modified_base 15: mod_base = OTHER; note = 2'-O-methylcytidine-3'-phosphate
  modified_base 16: mod_base = OTHER; note = 2'-O-methylguanosine-3'-phosphate
  modified_base 17: mod_base = OTHER; note = 2'-O-methylguanosine-3'-phosphate
  modified_base 18: mod_base = OTHER; note = 2'-O-methylguanosine-3'-phosphate
  modified_base 19: mod_base = OTHER; note = 2'-O-methyluridine-3'-phosphate
  modified_base 20: mod_base = OTHER; note = 2'-O-methylcytidine-3'-phosphate
  modified_base 21: mod_base = OTHER; note = 2'-O-methylguanosine-3'-phosphorothioate
  modified_base 22: mod_base = OTHER; note = 2'-O-methylguanosine-3'-phosphorothioate
  modified_base 23: mod_base = OTHER; note = 2'-O-methylguanosine
  misc_feature 1: note = RNA
  misc_feature 3..4: note = RNA
  misc_feature 6: note = RNA
  misc_feature 8..11: note = RNA
  misc_feature 13..23: note = RNA
  misc_feature 2: note = DNA
  misc_feature 5: note = DNA
  misc_feature 7: note = DNA
  misc_feature 12: note = DNA
ataattgtagagaacgggtcggg

SEQ ID NO: 474 - DNA, 23 bp, synthetic construct
  source 1..23: mol_type = other DNA
  modified_base 1: mod_base = OTHER; note = 2'-O-methyladenosine-3'-phosphorothioate
  modified_base 2: mod_base = OTHER; note = 2'-deoxythymidine-3'-phosphorothioate
  modified_base 3: mod_base = OTHER; note = 2'-O-methyladenosine-3'-phosphate
  modified_base 4: mod_base = OTHER; note = 2'-O-methyladenosine-3'-phosphate
  modified_base 6: mod_base = OTHER; note = 2'-O-methyluridine-3'-phosphate
  modified_base 8: mod_base = OTHER; note = 2'-O-methyluridine-3'-phosphate
  modified_base 9: mod_base = OTHER; note = 2'-O-methyladenosine-3'-phosphate
  modified_base 10: mod_base = OTHER; note = 2'-O-methylguanosine-3'-phosphate
  modified_base 11: mod_base = OTHER; note = 2'-O-methyladenosine-3'-phosphate
  modified_base 13: mod_base = OTHER; note = 2'-O-methyladenosine-3'-phosphate
  modified_base 14: mod_base = OTHER; note = 2'-deoxy-2'-fluoroadenosine-3'-phosphate
  modified_base 15: mod_base = OTHER; note = 2'-O-methylcytidine-3'-phosphate
  modified_base 16: mod_base = OTHER; note = 2'-O-methylguanosine-3'-phosphate
  modified_base 17: mod_base = OTHER; note = 2'-O-methylguanosine-3'-phosphate
  modified_base 18: mod_base = OTHER; note = 2'-O-methylcytidine-3'-phosphate
  modified_base 19: mod_base = OTHER; note = 2'-O-methyladenosine-3'-phosphate
  modified_base 20: mod_base = OTHER; note = 2'-O-methylcytidine-3'-phosphate
  modified_base 21: mod_base = OTHER; note = 2'-O-methylguanosine-3'-phosphorothioate
  modified_base 22: mod_base = OTHER; note = 2'-O-methylguanosine-3'-phosphorothioate
  modified_base 23: mod_base = OTHER; note = 2'-O-methylguanosine
  misc_feature 1: note = RNA
  misc_feature 3..4: note = RNA
  misc_feature 6: note = RNA
  misc_feature 8..11: note = RNA
  misc_feature 13..23: note = RNA
  misc_feature 2: note = DNA
  misc_feature 5: note = DNA
  misc_feature 7: note = DNA
  misc_feature 12: note = DNA
ataattgtagagaacggcacggg

SEQ ID NO: 475 - DNA, 21 bp, synthetic construct
  source 1..21: mol_type = other DNA
  modified_base 1: mod_base = OTHER; note = 2'-O-methyladenosine-3'-phosphorothioate
  modified_base 2: mod_base = OTHER; note = 2'-deoxythymidine-3'-phosphorothioate
  modified_base 3: mod_base = OTHER; note = 2'-O-methyladenosine-3'-phosphate
  modified_base 4: mod_base = OTHER; note = 2'-O-methyladenosine-3'-phosphate
  modified_base 6: mod_base = OTHER; note = 2'-O-methyluridine-3'-phosphate
  modified_base 8: mod_base = OTHER; note = 2'-O-methyluridine-3'-phosphate
  modified_base 9: mod_base = OTHER; note = 2'-O-methyladenosine-3'-phosphate
  modified_base 10: mod_base = OTHER; note = 2'-O-methylguanosine-3'-phosphate
  modified_base 11: mod_base = OTHER; note = 2'-O-methyladenosine-3'-phosphate
  modified_base 13: mod_base = OTHER; note = 2'-O-methyladenosine-3'-phosphate
  modified_base 14: mod_base = OTHER; note = 2'-deoxy-2'-fluoroadenosine-3'-phosphate
  modified_base 15: mod_base = OTHER; note = 2'-O-methylcytidine-3'-phosphate
  modified_base 16: mod_base = OTHER; note = 2'-O-methylguanosine-3'-phosphate
  modified_base 17: mod_base = OTHER; note = 2'-O-methylcytidine-3'-phosphate
  modified_base 18: mod_base = OTHER; note = 2'-O-methylcytidine-3'-phosphate
  modified_base 19: mod_base = OTHER; note = 2'-O-methyluridine-3'-phosphorothioate
  modified_base 20: mod_base = OTHER; note = 2'-O-methylcytidine-3'-phosphorothioate
  modified_base 21: mod_base = OTHER; note = 2'-O-methylguanosine
  misc_feature 1: note = RNA
  misc_feature 3..4: note = RNA
  misc_feature 6: note = RNA
  misc_feature 8..11: note = RNA
  misc_feature 13..21: note = RNA
  misc_feature 2: note = DNA
  misc_feature 5: note = DNA
  misc_feature 7: note = DNA
  misc_feature 12: note = DNA
ataattgtagagaacgcctcg

SEQ ID NO: 476 - DNA, 21 bp, synthetic construct
  source 1..21: mol_type = other DNA
  modified_base 1: mod_base = OTHER; note = 2'-O-methyladenosine-3'-phosphorothioate
  modified_base 2: mod_base = OTHER; note = 2'-deoxythymidine-3'-phosphorothioate
  modified_base 3: mod_base = OTHER; note = 2'-O-methyladenosine-3'-phosphate
  modified_base 4: mod_base = OTHER; note = 2'-O-methyladenosine-3'-phosphate
  modified_base 6: mod_base = OTHER; note = 2'-O-methyluridine-3'-phosphate
  modified_base 8: mod_base = OTHER; note = 2'-O-methyluridine-3'-phosphate
  modified_base 9: mod_base = OTHER; note = 2'-O-methyladenosine-3'-phosphate
  modified_base 10: mod_base = OTHER; note = 2'-O-methylguanosine-3'-phosphate
  modified_base 11: mod_base = OTHER; note = 2'-O-methyladenosine-3'-phosphate
  modified_base 13: mod_base = OTHER; note = 2'-O-methyladenosine-3'-phosphate
  modified_base 14: mod_base = OTHER; note = 2'-deoxy-2'-fluoroadenosine-3'-phosphate
  modified_base 15: mod_base = OTHER; note = 2'-O-methylcytidine-3'-phosphate
  modified_base 16: mod_base = OTHER; note = 2'-O-methylguanosine-3'-phosphate
  modified_base 17: mod_base = OTHER; note = 2'-O-methylguanosine-3'-phosphate
  modified_base 18: mod_base = OTHER; note = 2'-O-methylguanosine-3'-phosphate
  modified_base 19: mod_base = OTHER; note = 2'-O-methyluridine-3'-phosphorothioate
  modified_base 20: mod_base = OTHER; note = 2'-O-methylcytidine-3'-phosphorothioate
  modified_base 21: mod_base = OTHER; note = 2'-O-methylguanosine
  misc_feature 1: note = RNA
  misc_feature 3..4: note = RNA
  misc_feature 6: note = RNA
  misc_feature 8..11: note = RNA
  misc_feature 13..21: note = RNA
  misc_feature 2: note = DNA
  misc_feature 5: note = DNA
  misc_feature 7: note = DNA
  misc_feature 12: note = DNA
ataattgtagagaacgggtcg

SEQ ID NO: 477 - DNA, 21 bp, synthetic construct
  source 1..21: mol_type = other DNA
  modified_base 1: mod_base = OTHER; note = 2'-O-methyladenosine-3'-phosphorothioate
  modified_base 2: mod_base = OTHER; note = 2'-deoxythymidine-3'-phosphorothioate
  modified_base 3: mod_base = OTHER; note = 2'-O-methyladenosine-3'-phosphate
  modified_base 4: mod_base = OTHER; note = 2'-O-methyladenosine-3'-phosphate
  modified_base 6: mod_base = OTHER; note = 2'-O-methyluridine-3'-phosphate
  modified_base 8: mod_base = OTHER; note = 2'-O-methyluridine-3'-phosphate
  modified_base 9: mod_base = OTHER; note = 2'-O-methyladenosine-3'-phosphate
  modified_base 10: mod_base = OTHER; note = 2'-O-methylguanosine-3'-phosphate
  modified_base 11: mod_base = OTHER; note = 2'-O-methyladenosine-3'-phosphate
  modified_base 13: mod_base = OTHER; note = 2'-O-methyladenosine-3'-phosphate
  modified_base 14: mod_base = OTHER; note = 2'-deoxy-2'-fluoroadenosine-3'-phosphate
  modified_base 15: mod_base = OTHER; note = 2'-O-methylcytidine-3'-phosphate
  modified_base 16: mod_base = OTHER; note = 2'-O-methylguanosine-3'-phosphate
  modified_base 17: mod_base = OTHER; note = 2'-O-methylguanosine-3'-phosphate
  modified_base 18: mod_base = OTHER; note = 2'-O-methylcytidine-3'-phosphate
  modified_base 19: mod_base = OTHER; note = 2'-O-methyladenosine-3'-phosphorothioate
  modified_base 20: mod_base = OTHER; note = 2'-O-methylcytidine-3'-phosphorothioate
  modified_base 21: mod_base = OTHER; note = 2'-O-methylguanosine
  misc_feature 1: note = RNA
  misc_feature 3..4: note = RNA
  misc_feature 6: note = RNA
  misc_feature 8..11: note = RNA
  misc_feature 13..21: note = RNA
  misc_feature 2: note = DNA
  misc_feature 5: note = DNA
  misc_feature 7: note = DNA
  misc_feature 12: note = DNA
ataattgtagagaacggcacg

SEQ ID NO: 478 - DNA, 23 bp, synthetic construct
  source 1..23: mol_type = other DNA
  modified_base 1: mod_base = OTHER; note = 2'-O-methyladenosine-3'-phosphorothioate
  modified_base 2: mod_base = OTHER; note = 2'-deoxythymidine-3'-phosphorothioate
  modified_base 3: mod_base = OTHER; note = 2'-O-methyladenosine-3'-phosphate
  modified_base 4: mod_base = OTHER; note = 2'-O-methyladenosine-3'-phosphate
  modified_base 6: mod_base = OTHER; note = 2'-O-methyluridine-3'-phosphate
  modified_base 7: mod_base = OTHER; note = guanosine-2'-phosphate
  modified_base 8: mod_base = OTHER; note = 2'-O-methyluridine-3'-phosphate
  modified_base 9: mod_base = OTHER; note = 2'-O-methyladenosine-3'-phosphate
  modified_base 10: mod_base = OTHER; note = 2'-O-methylguanosine-3'-phosphate
  modified_base 11: mod_base = OTHER; note = 2'-O-methyladenosine-3'-phosphate
  modified_base 13: mod_base = OTHER; note = 2'-O-methyladenosine-3'-phosphate
  modified_base 14: mod_base = OTHER; note = 2'-deoxy-2'-fluoroadenosine-3'-phosphate
  modified_base 15: mod_base = OTHER; note = 2'-O-methylcytidine-3'-phosphate
  modified_base 16: mod_base = OTHER; note = 2'-deoxy-2'-fluoroguanosine-3'-phosphate
  modified_base 17: mod_base = OTHER; note = 2'-O-methylguanosine-3'-phosphate
  modified_base 18: mod_base = OTHER; note = 2'-O-methylcytidine-3'-phosphate
  modified_base 19: mod_base = OTHER; note = 2'-O-methyluridine-3'-phosphate
  modified_base 20: mod_base = OTHER; note = 2'-O-methylcytidine-3'-phosphate
  modified_base 21: mod_base = OTHER; note = 2'-O-methylguanosine-3'-phosphorothioate
  modified_base 22: mod_base = OTHER; note = 2'-O-methylguanosine-3'-phosphorothioate
  modified_base 23: mod_base = OTHER; note = 2'-O-methyladenosine
  misc_feature 1: note = RNA
  misc_feature 3..4: note = RNA
  misc_feature 6..11: note = RNA
  misc_feature 13..23: note = RNA
  misc_feature 2: note = DNA
  misc_feature 5: note = DNA
  misc_feature 12: note = DNA
ataattgtagagaacggctcgga

SEQ ID NO: 479 - DNA, 23 bp, synthetic construct
  source 1..23: mol_type = other DNA
  modified_base 1: mod_base = OTHER; note = 2'-O-methyladenosine-3'-phosphorothioate
  modified_base 2: mod_base = OTHER; note = 2'-deoxy-2'-fluoroguanosine-3'-phosphorothioate
  modified_base 3: mod_base = OTHER; note = 2'-O-methyluridine-3'-phosphate
  modified_base 4: mod_base = OTHER; note = 2'-O-methyladenosine-3'-phosphate
  modified_base 6: mod_base = OTHER; note = 2'-O-methyluridine-3'-phosphate
  modified_base 7: mod_base = OTHER; note = Thymidine-glycol nucleic acid (GNA), S-Isomer
  modified_base 8: mod_base = OTHER; note = 2'-O-methylguanosine-3'-phosphate
  modified_base 9: mod_base = OTHER; note = 2'-O-methyluridine-3'-phosphate
  modified_base 10: mod_base = OTHER; note = 2'-O-methyladenosine-3'-phosphate
  modified_base 11: mod_base = OTHER; note = 2'-O-methylguanosine-3'-phosphate
  modified_base 12: mod_base = OTHER; note = 2'-O-methyladenosine-3'-phosphate
  modified_base 13: mod_base = OTHER; note = 2'-O-methylguanosine-3'-phosphate
  modified_base 14: mod_base = OTHER; note = 2'-deoxy-2'-fluoroadenosine-3'-phosphate
  modified_base 15: mod_base = OTHER; note = 2'-O-methyladenosine-3'-phosphate
  modified_base 16: mod_base = OTHER; note = 2'-deoxy-2'-fluorocytidine-3'-phosphate
  modified_base 17: mod_base = OTHER; note = 2'-O-methylguanosine-3'-phosphate
  modified_base 18: mod_base = OTHER; note = 2'-O-methylguanosine-3'-phosphate
  modified_base 19: mod_base = OTHER; note = 2'-O-methylcytidine-3'-phosphate
  modified_base 20: mod_base = OTHER; note = 2'-O-methyluridine-3'-phosphate
  modified_base 21: mod_base = OTHER; note = 2'-O-methylcytidine-3'-phosphorothioate
  modified_base 22: mod_base = OTHER; note = 2'-O-methylguanosine-3'-phosphorothioate
  modified_base 23: mod_base = OTHER; note = 2'-O-methylguanosine
  misc_feature 1..4: note = RNA
  misc_feature 6..23: note = RNA
  misc_feature 5: note = DNA
agtaattgtagagaacggctcgg

SEQ ID NO: 480 - DNA, 23 bp, synthetic construct
  source 1..23: mol_type = other DNA
  modified_base 1: mod_base = OTHER; note = 2'-O-methyladenosine-3'-phosphorothioate
  modified_base 2: mod_base = OTHER; note = 2'-deoxy-2'-fluoroguanosine-3'-phosphorothioate
  modified_base 3: mod_base = OTHER; note = 2'-O-methyluridine-3'-phosphate
  modified_base 4: mod_base = OTHER; note = 2'-O-methyladenosine-3'-phosphate
  modified_base 6: mod_base = OTHER; note = 2'-O-methyluridine-3'-phosphate
  modified_base 7: mod_base = OTHER; note = uridine-2'-phosphate
  modified_base 8: mod_base = OTHER; note = 2'-O-methylguanosine-3'-phosphate
  modified_base 9: mod_base = OTHER; note = 2'-O-methyluridine-3'-phosphate
  modified_base 10: mod_base = OTHER; note = 2'-O-methyladenosine-3'-phosphate
  modified_base 11: mod_base = OTHER; note = 2'-O-methylguanosine-3'-phosphate
  modified_base 12: mod_base = OTHER; note = 2'-O-methyladenosine-3'-phosphate
  modified_base 13: mod_base = OTHER; note = 2'-O-methylguanosine-3'-phosphate
  modified_base 14: mod_base = OTHER; note = 2'-deoxy-2'-fluoroadenosine-3'-phosphate
  modified_base 15: mod_base = OTHER; note = 2'-O-methyladenosine-3'-phosphate
  modified_base 16: mod_base = OTHER; note = 2'-deoxy-2'-fluorocytidine-3'-phosphate
  modified_base 17: mod_base = OTHER; note = 2'-O-methylguanosine-3'-phosphate
  modified_base 18: mod_base = OTHER; note = 2'-O-methylguanosine-3'-phosphate
  modified_base 19: mod_base = OTHER; note = 2'-O-methylcytidine-3'-phosphate
  modified_base 20: mod_base = OTHER; note = 2'-O-methyluridine-3'-phosphate
  modified_base 21: mod_base = OTHER; note = 2'-O-methylcytidine-3'-phosphorothioate
  modified_base 22: mod_base = OTHER; note = 2'-O-methylguanosine-3'-phosphorothioate
  modified_base 23: mod_base = OTHER; note = 2'-O-methylguanosine
  misc_feature 1..4: note = RNA
  misc_feature 6..23: note = RNA
  misc_feature 5: note = DNA
agtaattgtagagaacggctcgg

SEQ ID NO: 481 - RNA, 23 nt, synthetic construct
  source 1..23: mol_type = other RNA
  modified_base 1: mod_base = OTHER; note = 2'-O-methyladenosine-3'-phosphorothioate
  modified_base 2: mod_base = OTHER; note = 2'-deoxy-2'-fluoroguanosine-3'-phosphorothioate
  modified_base 3: mod_base = OTHER; note = 2'-O-methyluridine-3'-phosphate
  modified_base 4: mod_base = OTHER; note = 2'-O-methyladenosine-3'-phosphate
  modified_base 5: mod_base = OTHER; note = 2'-O-methyladenosine-3'-phosphate
  modified_base 6: mod_base = OTHER; note = 2'-deoxy-2'-fluorouridine-3'-phosphate
  modified_base 7: mod_base = OTHER; note = 2'-O-methyluridine-3'-phosphate
  modified_base 8: mod_base = OTHER; note = guanosine-2'-phosphate
  modified_base 9: mod_base = OTHER; note = 2'-deoxy-2'-fluorouridine-3'-phosphate
  modified_base 10: mod_base = OTHER; note = 2'-O-methyladenosine-3'-phosphate
  modified_base 11: mod_base = OTHER; note = 2'-O-methylguanosine-3'-phosphate
  modified_base 12: mod_base = OTHER; note = 2'-O-methyladenosine-3'-phosphate
  modified_base 13: mod_base = OTHER; note = 2'-O-methylguanosine-3'-phosphate
  modified_base 14: mod_base = OTHER; note = 2'-deoxy-2'-fluoroadenosine-3'-phosphate
  modified_base 15: mod_base = OTHER; note = 2'-O-methyladenosine-3'-phosphate
  modified_base 16: mod_base = OTHER; note = 2'-deoxy-2'-fluorocytidine-3'-phosphate
  modified_base 17: mod_base = OTHER; note = 2'-O-methylguanosine-3'-phosphate
  modified_base 18: mod_base = OTHER; note = 2'-O-methylguanosine-3'-phosphate
  modified_base 19: mod_base = OTHER; note = 2'-O-methylcytidine-3'-phosphate
  modified_base 20: mod_base = OTHER; note = 2'-O-methyluridine-3'-phosphate
  modified_base 21: mod_base = OTHER; note = 2'-O-methylcytidine-3'-phosphorothioate
  modified_base 22: mod_base = OTHER; note = 2'-O-methylguanosine-3'-phosphorothioate
  modified_base 23: mod_base = OTHER; note = 2'-O-methylguanosine
agtaattgtagagaacggctcgg

SEQ ID NO: 482 - RNA, 23 nt, synthetic construct
  source 1..23: mol_type = other RNA
  modified_base 1: mod_base = OTHER; note = 2'-O-methyladenosine-3'-phosphorothioate
  modified_base 2: mod_base = OTHER; note = 2'-deoxy-2'-fluoroguanosine-3'-phosphorothioate
  modified_base 3: mod_base = OTHER; note = 2'-O-methyluridine-3'-phosphate
  modified_base 4: mod_base = OTHER; note = 2'-O-methyladenosine-3'-phosphate
  modified_base 5: mod_base = OTHER; note = 2'-O-methyladenosine-3'-phosphate
  modified_base 6: mod_base = OTHER; note = 2'-deoxy-2'-fluorouridine-3'-phosphate
  modified_base 7: mod_base = OTHER; note = 2'-O-methyluridine-3'-phosphate
  modified_base 8: mod_base = OTHER; note = 2'-deoxy-2'-fluoroguanosine-3'-phosphate
  modified_base 9: mod_base = OTHER; note = uridine-2'-phosphate
  modified_base 10: mod_base = OTHER; note = 2'-O-methyladenosine-3'-phosphate
  modified_base 11: mod_base = OTHER; note = 2'-O-methylguanosine-3'-phosphate
  modified_base 12: mod_base = OTHER; note = 2'-O-methyladenosine-3'-phosphate
  modified_base 13: mod_base = OTHER; note = 2'-O-methylguanosine-3'-phosphate
  modified_base 14: mod_base = OTHER; note = 2'-deoxy-2'-fluoroadenosine-3'-phosphate
  modified_base 15: mod_base = OTHER; note = 2'-O-methyladenosine-3'-phosphate
  modified_base 16: mod_base = OTHER; note = 2'-deoxy-2'-fluorocytidine-3'-phosphate
  modified_base 17: mod_base = OTHER; note = 2'-O-methylguanosine-3'-phosphate
  modified_base 18: mod_base = OTHER; note = 2'-O-methylguanosine-3'-phosphate
  modified_base 19: mod_base = OTHER; note = 2'-O-methylcytidine-3'-phosphate
  modified_base 20: mod_base = OTHER; note = 2'-O-methyluridine-3'-phosphate
  modified_base 21: mod_base = OTHER; note = 2'-O-methylcytidine-3'-phosphorothioate
  modified_base 22: mod_base = OTHER; note = 2'-O-methylguanosine-3'-phosphorothioate
  modified_base 23: mod_base = OTHER; note = 2'-O-methylguanosine
agtaattgtagagaacggctcgg

SEQ ID NO: 483 - RNA, 23 nt, synthetic construct
  source 1..23: mol_type = other RNA
  modified_base 1: mod_base = OTHER; note = 2'-O-methyladenosine-3'-phosphorothioate
  modified_base 2: mod_base = OTHER; note = 2'-deoxy-2'-fluoroguanosine-3'-phosphorothioate
  modified_base 3: mod_base = OTHER; note = 2'-O-methyluridine-3'-phosphate
  modified_base 4: mod_base = OTHER; note = 2'-O-methyladenosine-3'-phosphate
  modified_base 5: mod_base = OTHER; note = 2'-O-methyladenosine-3'-phosphate
  modified_base 6: mod_base = OTHER; note = 2'-deoxy-2'-fluorouridine-3'-phosphate
  modified_base 7: mod_base = OTHER; note = 2'-O-methyluridine-3'-phosphate
  modified_base 8: mod_base = OTHER; note = 2'-deoxy-2'-fluoroguanosine-3'-phosphate
  modified_base 9: mod_base = OTHER; note = 2'-deoxy-2'-fluorouridine-3'-phosphate
  modified_base 10: mod_base = OTHER; note = adenosine-2'-phosphate
  modified_base 11: mod_base = OTHER; note = 2'-O-methylguanosine-3'-phosphate
  modified_base 12: mod_base = OTHER; note = 2'-O-methyladenosine-3'-phosphate
  modified_base 13: mod_base = OTHER; note = 2'-O-methylguanosine-3'-phosphate
  modified_base 14: mod_base = OTHER; note = 2'-deoxy-2'-fluoroadenosine-3'-phosphate
  modified_base 15: mod_base = OTHER; note = 2'-O-methyladenosine-3'-phosphate
  modified_base 16: mod_base = OTHER; note = 2'-deoxy-2'-fluorocytidine-3'-phosphate
  modified_base 17: mod_base = OTHER; note = 2'-O-methylguanosine-3'-phosphate
  modified_base 18: mod_base = OTHER; note = 2'-O-methylguanosine-3'-phosphate
  modified_base 19: mod_base = OTHER; note = 2'-O-methylcytidine-3'-phosphate
  modified_base 20: mod_base = OTHER; note = 2'-O-methyluridine-3'-phosphate
  modified_base 21: mod_base = OTHER; note = 2'-O-methylcytidine-3'-phosphorothioate
  modified_base 22: mod_base = OTHER; note = 2'-O-methylguanosine-3'-phosphorothioate
  modified_base 23: mod_base = OTHER; note = 2'-O-methylguanosine
agtaattgtagagaacggctcgg

SEQ ID NO: 484 - RNA, 23 nt, synthetic construct
  source 1..23: mol_type = other RNA
  modified_base 1: mod_base = OTHER; note = 2'-O-methyladenosine-3'-phosphorothioate
  modified_base 2: mod_base = OTHER; note = 2'-deoxy-2'-fluoroguanosine-3'-phosphorothioate
  modified_base 3: mod_base = OTHER; note = 2'-O-methyluridine-3'-phosphate
  modified_base 4: mod_base = OTHER; note = 2'-O-methyladenosine-3'-phosphate
  modified_base 5: mod_base = OTHER; note = 2'-O-methyladenosine-3'-phosphate
  modified_base 6: mod_base = OTHER; note = 2'-deoxy-2'-fluorouridine-3'-phosphate
  modified_base 7: mod_base = OTHER; note = 2'-O-methyluridine-3'-phosphate
  modified_base 8: mod_base = OTHER; note = 2'-deoxy-2'-fluoroguanosine-3'-phosphate
  modified_base 9: mod_base = OTHER; note = 2'-deoxy-2'-fluorouridine-3'-phosphate
  modified_base 10: mod_base = OTHER; note = 2'-O-methyladenosine-3'-phosphate
  modified_base 11: mod_base = OTHER; note = guanosine-2'-phosphate
  modified_base 12: mod_base = OTHER; note = 2'-O-methyladenosine-3'-phosphate
  modified_base 13: mod_base = OTHER; note = 2'-O-methylguanosine-3'-phosphate
  modified_base 14: mod_base = OTHER; note = 2'-deoxy-2'-fluoroadenosine-3'-phosphate
  modified_base 15: mod_base = OTHER; note = 2'-O-methyladenosine-3'-phosphate
  modified_base 16: mod_base = OTHER; note = 2'-deoxy-2'-fluorocytidine-3'-phosphate
  modified_base 17: mod_base = OTHER; note = 2'-O-methylguanosine-3'-phosphate
  modified_base 18: mod_base = OTHER; note = 2'-O-methylguanosine-3'-phosphate
  modified_base 19: mod_base = OTHER; note = 2'-O-methylcytidine-3'-phosphate
  modified_base 20: mod_base = OTHER; note = 2'-O-methyluridine-3'-phosphate
  modified_base 21: mod_base = OTHER; note = 2'-O-methylcytidine-3'-phosphorothioate
  modified_base 22: mod_base = OTHER; note = 2'-O-methylguanosine-3'-phosphorothioate
  modified_base 23: mod_base = OTHER; note = 2'-O-methylguanosine
agtaattgtagagaacggctcgg

SEQ ID NO: 485 - RNA, 23 nt, synthetic construct
  source 1..23: mol_type = other RNA
  modified_base 1: mod_base = OTHER; note = 2'-O-methyladenosine-3'-phosphorothioate
  modified_base 2: mod_base = OTHER; note = 2'-deoxy-2'-fluoroguanosine-3'-phosphorothioate
  modified_base 3: mod_base = OTHER; note = 2'-O-methyluridine-3'-phosphate
  modified_base 4: mod_base = OTHER; note = 2'-O-methyladenosine-3'-phosphate
  modified_base 5: mod_base = OTHER; note = 2'-O-methyladenosine-3'-phosphate
  modified_base 6: mod_base = OTHER; note = 2'-deoxy-2'-fluorouridine-3'-phosphate
  modified_base 7: mod_base = OTHER; note = 2'-O-methyluridine-3'-phosphate
  modified_base 8: mod_base = OTHER; note = 2'-deoxy-2'-fluoroguanosine-3'-phosphate
  modified_base 9: mod_base = OTHER; note = 2'-deoxy-2'-fluorouridine-3'-phosphate
  modified_base 10: mod_base = OTHER; note = 2'-O-methyladenosine-3'-phosphate
  modified_base 11: mod_base = OTHER; note = 2'-O-methylguanosine-3'-phosphate
  modified_base 12: mod_base = OTHER; note = adenosine-2'-phosphate
  modified_base 13: mod_base = OTHER; note = 2'-O-methylguanosine-3'-phosphate
  modified_base 14: mod_base = OTHER; note = 2'-deoxy-2'-fluoroadenosine-3'-phosphate
  modified_base 15: mod_base = OTHER; note = 2'-O-methyladenosine-3'-phosphate
  modified_base 16: mod_base = OTHER; note = 2'-deoxy-2'-fluorocytidine-3'-phosphate
  modified_base 17: mod_base = OTHER; note = 2'-O-methylguanosine-3'-phosphate
  modified_base 18: mod_base = OTHER; note = 2'-O-methylguanosine-3'-phosphate
  modified_base 19: mod_base = OTHER; note = 2'-O-methylcytidine-3'-phosphate
  modified_base 20: mod_base = OTHER; note = 2'-O-methyluridine-3'-phosphate
  modified_base 21: mod_base = OTHER; note = 2'-O-methylcytidine-3'-phosphorothioate
  modified_base 22: mod_base = OTHER; note = 2'-O-methylguanosine-3'-phosphorothioate
  modified_base 23: mod_base = OTHER; note = 2'-O-methylguanosine
agtaattgtagagaacggctcgg

SEQ ID NO: 486 - RNA, 23 nt, synthetic construct
  source 1..23: mol_type = other RNA
  modified_base 1: mod_base = OTHER; note = 2'-O-methyladenosine-3'-phosphorothioate
  modified_base 2: mod_base = OTHER; note = 2'-deoxy-2'-fluoroguanosine-3'-phosphorothioate
  modified_base 3: mod_base = OTHER; note = 2'-O-methyluridine-3'-phosphate
  modified_base 4: mod_base = OTHER; note = 2'-O-methyladenosine-3'-phosphate
  modified_base 5: mod_base = OTHER; note = 2'-O-methyladenosine-3'-phosphate
  modified_base 6: mod_base = OTHER; note = 2'-deoxy-2'-fluorouridine-3'-phosphate
  modified_base 7: mod_base = OTHER; note = 2'-O-methyluridine-3'-phosphate
  modified_base 8: mod_base = OTHER; note = 2'-deoxy-2'-fluoroguanosine-3'-phosphate
  modified_base 9: mod_base = OTHER; note = 2'-deoxy-2'-fluorouridine-3'-phosphate
  modified_base 10: mod_base = OTHER; note = 2'-O-methyladenosine-3'-phosphate
  modified_base 11: mod_base = OTHER; note = 2'-O-methylguanosine-3'-phosphate
  modified_base 12: mod_base = OTHER; note = 2'-O-methyladenosine-3'-phosphate
  modified_base 13: mod_base = OTHER; note = guanosine-2'-phosphate
  modified_base 14: mod_base = OTHER; note = 2'-deoxy-2'-fluoroadenosine-3'-phosphate
  modified_base 15: mod_base = OTHER; note = 2'-O-methyladenosine-3'-phosphate
  modified_base 16: mod_base = OTHER; note = 2'-deoxy-2'-fluorocytidine-3'-phosphate
  modified_base 17: mod_base = OTHER; note = 2'-O-methylguanosine-3'-phosphate
  modified_base 18: mod_base = OTHER; note = 2'-O-methylguanosine-3'-phosphate
  modified_base 19: mod_base = OTHER; note = 2'-O-methylcytidine-3'-phosphate
  modified_base 20: mod_base = OTHER; note = 2'-O-methyluridine-3'-phosphate
  modified_base 21: mod_base = OTHER; note = 2'-O-methylcytidine-3'-phosphorothioate
  modified_base 22: mod_base = OTHER; note = 2'-O-methylguanosine-3'-phosphorothioate
  modified_base 23: mod_base = OTHER; note = 2'-O-methylguanosine
agtaattgtagagaacggctcgg

SEQ ID NO: 487 - RNA, 23 nt, synthetic construct
  source 1..23: mol_type = other RNA
  modified_base 1: mod_base = OTHER; note = 2'-O-methyladenosine-3'-phosphorothioate
  modified_base 2: mod_base = OTHER; note = 2'-deoxy-2'-fluoroguanosine-3'-phosphorothioate
  modified_base 3: mod_base = OTHER; note = 2'-O-methyluridine-3'-phosphate
  modified_base 4: mod_base = OTHER; note = 2'-O-methyladenosine-3'-phosphate
  modified_base 5: mod_base = OTHER; note = 2'-O-methyladenosine-3'-phosphate
  modified_base 6: mod_base = OTHER; note = 2'-deoxy-2'-fluorouridine-3'-phosphate
  modified_base 7: mod_base = OTHER; note = 2'-O-methyluridine-3'-phosphate
  modified_base 8: mod_base = OTHER; note = 2'-deoxy-2'-fluoroguanosine-3'-phosphate
  modified_base 9: mod_base = OTHER; note = 2'-deoxy-2'-fluorouridine-3'-phosphate
  modified_base 10: mod_base = OTHER; note = 2'-O-methyladenosine-3'-phosphate
  modified_base 11: mod_base = OTHER; note = 2'-O-methylguanosine-3'-phosphate
  modified_base 12: mod_base = OTHER; note = 2'-O-methyladenosine-3'-phosphate
  modified_base 13: mod_base = OTHER; note = 2'-O-methylguanosine-3'-phosphate
  modified_base 14: mod_base = OTHER; note = adenosine-2'-phosphate
  modified_base 15: mod_base = OTHER; note = 2'-O-methyladenosine-3'-phosphate
  modified_base 16: mod_base = OTHER; note = 2'-deoxy-2'-fluorocytidine-3'-phosphate
  modified_base 17: mod_base = OTHER; note = 2'-O-methylguanosine-3'-phosphate
  modified_base 18: mod_base = OTHER; note = 2'-O-methylguanosine-3'-phosphate
  modified_base 19: mod_base = OTHER; note = 2'-O-methylcytidine-3'-phosphate
  modified_base 20: mod_base = OTHER; note = 2'-O-methyluridine-3'-phosphate
  modified_base 21: mod_base = OTHER; note = 2'-O-methylcytidine-3'-phosphorothioate
  modified_base 22: mod_base = OTHER; note = 2'-O-methylguanosine-3'-phosphorothioate
  modified_base 23: mod_base = OTHER; note = 2'-O-methylguanosine
agtaattgtagagaacggctcgg

SEQ ID NO: 488 - RNA, 23 nt, synthetic construct
  source 1..23: mol_type = other RNA
  modified_base 1: mod_base = OTHER; note = 2'-O-methyladenosine-3'-phosphorothioate
  modified_base 2: mod_base = OTHER; note = 2'-deoxy-2'-fluoroguanosine-3'-phosphorothioate
  modified_base 3: mod_base = OTHER; note = 2'-O-methyluridine-3'-phosphate
  modified_base 4: mod_base = OTHER; note = 2'-O-methyladenosine-3'-phosphate
  modified_base 5: mod_base = OTHER; note = 2'-O-methyladenosine-3'-phosphate
  modified_base 6: mod_base = OTHER; note = 2'-deoxy-2'-fluorouridine-3'-phosphate
  modified_base 7: mod_base = OTHER; note = 2'-O-methyluridine-3'-phosphate
  modified_base 8: mod_base = OTHER; note = 2'-deoxy-2'-fluoroguanosine-3'-phosphate
  modified_base 9: mod_base = OTHER; note = 2'-deoxy-2'-fluorouridine-3'-phosphate
  modified_base 10: mod_base = OTHER; note = 2'-O-methyladenosine-3'-phosphate
  modified_base 11: mod_base = OTHER; note = 2'-O-methylguanosine-3'-phosphate
  modified_base 12: mod_base = OTHER; note = 2'-O-methyladenosine-3'-phosphate
  modified_base 13: mod_base = OTHER; note = 2'-O-methylguanosine-3'-phosphate
  modified_base 14: mod_base = OTHER; note = 2'-deoxy-2'-fluoroadenosine-3'-phosphate
  modified_base 15: mod_base = OTHER; note = adenosine-2'-phosphate
  modified_base 16: mod_base = OTHER; note = 2'-deoxy-2'-fluorocytidine-3'-phosphate
  modified_base 17: mod_base = OTHER; note = 2'-O-methylguanosine-3'-phosphate
  modified_base 18: mod_base = OTHER; note = 2'-O-methylguanosine-3'-phosphate
  modified_base 19: mod_base = OTHER; note = 2'-O-methylcytidine-3'-phosphate
  modified_base 20: mod_base = OTHER; note = 2'-O-methyluridine-3'-phosphate
  modified_base 21: mod_base = OTHER; note = 2'-O-methylcytidine-3'-phosphorothioate
  modified_base 22: mod_base = OTHER; note = 2'-O-methylguanosine-3'-phosphorothioate
  modified_base 23: mod_base = OTHER; note = 2'-O-methylguanosine
agtaattgtagagaacggctcgg

SEQ ID NO: 489 - RNA, 23 nt, synthetic construct
  source 1..23: mol_type = other RNA
  modified_base 1: mod_base = OTHER; note = 2'-O-methyladenosine-3'-phosphorothioate
  modified_base 2: mod_base = OTHER; note = 2'-deoxy-2'-fluoroguanosine-3'-phosphorothioate
  modified_base 3: mod_base = OTHER; note = 2'-O-methyluridine-3'-phosphate
  modified_base 4: mod_base = OTHER; note = 2'-O-methyladenosine-3'-phosphate
  modified_base 5: mod_base = OTHER; note = 2'-O-methyladenosine-3'-phosphate
  modified_base 6: mod_base = OTHER; note = 2'-deoxy-2'-fluorouridine-3'-phosphate
  modified_base 7: mod_base = OTHER; note = 2'-O-methyluridine-3'-phosphate
  modified_base 8: mod_base = OTHER; note = 2'-deoxy-2'-fluoroguanosine-3'-phosphate
  modified_base 9: mod_base = OTHER; note = 2'-deoxy-2'-fluorouridine-3'-phosphate
  modified_base 10: mod_base = OTHER; note = 2'-O-methyladenosine-3'-phosphate
  modified_base 11: mod_base = OTHER; note = 2'-O-methylguanosine-3'-phosphate
  modified_base 12: mod_base = OTHER; note = 2'-O-methyladenosine-3'-phosphate
  modified_base 13: mod_base = OTHER; note = 2'-O-methylguanosine-3'-phosphate
  modified_base 14: mod_base = OTHER; note = 2'-deoxy-2'-fluoroadenosine-3'-phosphate
  modified_base 15: mod_base = OTHER; note = 2'-O-methyladenosine-3'-phosphate
  modified_base 16: mod_base = OTHER; note = cytidine-2'-phosphate
  modified_base 17: mod_base = OTHER; note = 2'-O-methylguanosine-3'-phosphate
  modified_base 18: mod_base = OTHER; note = 2'-O-methylguanosine-3'-phosphate
  modified_base 19: mod_base = OTHER; note = 2'-O-methylcytidine-3'-phosphate
  modified_base 20: mod_base = OTHER; note = 2'-O-methyluridine-3'-phosphate
  modified_base 21: mod_base = OTHER; note = 2'-O-methylcytidine-3'-phosphorothioate
  modified_base 22: mod_base = OTHER; note = 2'-O-methylguanosine-3'-phosphorothioate
  modified_base 23: mod_base = OTHER; note = 2'-O-methylguanosine
agtaattgtagagaacggctcgg

SEQ ID NO: 490 - RNA, 23 nt, synthetic construct
  source 1..23: mol_type = other RNA
  modified_base 1: mod_base = OTHER; note = 2'-O-methyladenosine-3'-phosphorothioate
  modified_base 2: mod_base = OTHER; note = 2'-deoxy-2'-fluoroguanosine-3'-phosphorothioate
  modified_base 3: mod_base = OTHER; note = 2'-O-methyluridine-3'-phosphate
  modified_base 4: mod_base = OTHER; note = 2'-O-methyladenosine-3'-phosphate
  modified_base 5: mod_base = OTHER; note = 2'-O-methyladenosine-3'-phosphate
  modified_base 6: mod_base = OTHER; note = 2'-deoxy-2'-fluoroadenosine-3'-phosphate
  modified_base 7: mod_base = OTHER; note = 2'-O-methyluridine-3'-phosphate
  modified_base 8: mod_base = OTHER; note = 2'-deoxy-2'-fluoroguanosine-3'-phosphate
  modified_base 9: mod_base = OTHER; note = 2'-deoxy-2'-fluorouridine-3'-phosphate
  modified_base 10: mod_base = OTHER; note = 2'-O-methyladenosine-3'-phosphate
  modified_base 11: mod_base = OTHER; note = 2'-O-methylguanosine-3'-phosphate
  modified_base 12: mod_base = OTHER; note = 2'-O-methyladenosine-3'-phosphate
  modified_base 13: mod_base = OTHER; note = 2'-O-methylguanosine-3'-phosphate
  modified_base 14: mod_base = OTHER; note = 2'-deoxy-2'-fluoroadenosine-3'-phosphate
  modified_base 15: mod_base = OTHER; note = 2'-O-methyladenosine-3'-phosphate
  modified_base 16: mod_base = OTHER; note = 2'-deoxy-2'-fluorocytidine-3'-phosphate
  modified_base 17: mod_base = OTHER; note = 2'-O-methylguanosine-3'-phosphate
  modified_base 18: mod_base = OTHER; note = 2'-O-methylguanosine-3'-phosphate
  modified_base 19: mod_base = OTHER; note = 2'-O-methylcytidine-3'-phosphate
  modified_base 20: mod_base = OTHER; note = 2'-O-methyluridine-3'-phosphate
  modified_base 21: mod_base = OTHER; note = 2'-O-methylcytidine-3'-phosphorothioate
  modified_base 22: mod_base = OTHER; note = 2'-O-methylguanosine-3'-phosphorothioate
  modified_base 23: mod_base = OTHER; note = 2'-O-methylguanosine
agtaaatgtagagaacggctcgg

SEQ ID NO: 491 - RNA, 23 nt, synthetic construct
  source 1..23: mol_type = other RNA
  modified_base 1: mod_base = OTHER; note = 2'-O-methyladenosine-3'-phosphorothioate
  modified_base 2: mod_base = OTHER; note = 2'-deoxy-2'-fluoroguanosine-3'-phosphorothioate
  modified_base 3: mod_base = OTHER; note = 2'-O-methyluridine-3'-phosphate
  modified_base 4: mod_base = OTHER; note = 2'-O-methyladenosine-3'-phosphate
  modified_base 5: mod_base = OTHER; note = 2'-O-methyladenosine-3'-phosphate
  modified_base 6: mod_base = OTHER; note = 2'-deoxy-2'-fluorouridine-3'-phosphate
  modified_base 7: mod_base = OTHER; note = 2'-O-methyladenosine-3'-phosphate
  modified_base 8: mod_base = OTHER; note = 2'-deoxy-2'-fluoroguanosine-3'-phosphate
  modified_base 9: mod_base = OTHER; note = 2'-deoxy-2'-fluorouridine-3'-phosphate
  modified_base 10: mod_base = OTHER; note = 2'-O-methyladenosine-3'-phosphate
  modified_base 11: mod_base = OTHER; note = 2'-O-methylguanosine-3'-phosphate
  modified_base 12: mod_base = OTHER; note = 2'-O-methyladenosine-3'-phosphate
  modified_base 13: mod_base = OTHER; note = 2'-O-methylguanosine-3'-phosphate
  modified_base 14: mod_base = OTHER; note = 2'-deoxy-2'-fluoroadenosine-3'-phosphate
  modified_base 15: mod_base = OTHER; note = 2'-O-methyladenosine-3'-phosphate
  modified_base 16: mod_base = OTHER; note = 2'-deoxy-2'-fluorocytidine-3'-phosphate
  modified_base 17: mod_base = OTHER; note = 2'-O-methylguanosine-3'-phosphate
  modified_base 18: mod_base = OTHER; note = 2'-O-methylguanosine-3'-phosphate
  modified_base 19: mod_base = OTHER; note = 2'-O-methylcytidine-3'-phosphate
  modified_base 20: mod_base = OTHER; note = 2'-O-methyluridine-3'-phosphate
  modified_base 21: mod_base = OTHER; note = 2'-O-methylcytidine-3'-phosphorothioate
  modified_base 22: mod_base = OTHER; note = 2'-O-methylguanosine-3'-phosphorothioate
  modified_base 23: mod_base = OTHER; note = 2'-O-methylguanosine
agtaatagtagagaacggctcgg

SEQ ID NO: 492 - RNA, 23 nt, synthetic construct
  source 1..23: mol_type = other RNA
  modified_base 1: mod_base = OTHER; note = 2'-O-methyladenosine-3'-phosphorothioate
  modified_base 2: mod_base = OTHER; note = 2'-deoxy-2'-fluoroguanosine-3'-phosphorothioate
  modified_base 3: mod_base = OTHER; note = 2'-O-methyluridine-3'-phosphate
  modified_base 4: mod_base = OTHER; note = 2'-O-methyladenosine-3'-phosphate
  modified_base 5: mod_base = OTHER; note = 2'-O-methyladenosine-3'-phosphate
  modified_base 6: mod_base = OTHER; note = 2'-deoxy-2'-fluorouridine-3'-phosphate
  modified_base 7: mod_base = OTHER; note = 2'-O-methyluridine-3'-phosphate
  modified_base 8: mod_base = OTHER; note = 2'-deoxy-2'-fluoroadenosine-3'-phosphate
  modified_base 9: mod_base = OTHER; note = 2'-deoxy-2'-fluorouridine-3'-phosphate
  modified_base 10: mod_base = OTHER; note = 2'-O-methyladenosine-3'-phosphate
  modified_base 11: mod_base = OTHER; note = 2'-O-methylguanosine-3'-phosphate
  modified_base 12: mod_base = OTHER; note = 2'-O-methyladenosine-3'-phosphate
  modified_base 13: mod_base = OTHER; note = 2'-O-methylguanosine-3'-phosphate
  modified_base 14: mod_base = OTHER; note = 2'-deoxy-2'-fluoroadenosine-3'-phosphate
  modified_base 15: mod_base = OTHER; note = 2'-O-methyladenosine-3'-phosphate
  modified_base 16: mod_base = OTHER; note = 2'-deoxy-2'-fluorocytidine-3'-phosphate
  modified_base 17: mod_base = OTHER; note = 2'-O-methylguanosine-3'-phosphate
  modified_base 18: mod_base = OTHER; note = 2'-O-methylguanosine-3'-phosphate
  modified_base 19: mod_base = OTHER; note = 2'-O-methylcytidine-3'-phosphate
  modified_base 20: mod_base = OTHER; note = 2'-O-methyluridine-3'-phosphate
  modified_base 21: mod_base = OTHER; note = 2'-O-methylcytidine-3'-phosphorothioate
  modified_base 22: mod_base = OTHER; note = 2'-O-methylguanosine-3'-phosphorothioate
  modified_base 23: mod_base = OTHER; note = 2'-O-methylguanosine
agtaattatagagaacggctcgg

SEQ ID NO: 493 - RNA, 23 nt, synthetic construct
  source 1..23: mol_type = other RNA
  modified_base 1: mod_base = OTHER; note = 2'-O-methyladenosine-3'-phosphorothioate
  modified_base 2: mod_base = OTHER; note = 2'-deoxy-2'-fluoroguanosine-3'-phosphorothioate
  modified_base 3: mod_base = OTHER; note = 2'-O-methyluridine-3'-phosphate
  modified_base 4: mod_base = OTHER; note = 2'-O-methyladenosine-3'-phosphate
  modified_base 5: mod_base = OTHER; note = 2'-O-methyladenosine-3'-phosphate
  modified_base 6: mod_base = OTHER; note = 2'-deoxy-2'-fluorouridine-3'-phosphate
  modified_base 7: mod_base = OTHER; note = 2'-O-methyluridine-3'-phosphate
  modified_base 8: mod_base = OTHER; note = 2'-deoxy-2'-fluoroguanosine-3'-phosphate
  modified_base 9: mod_base = OTHER; note = 2'-deoxy-2'-fluorouridine-3'-phosphate
  modified_base 10: mod_base = OTHER; note = 2'-O-methyladenosine-3'-phosphate
  modified_base 11: mod_base = OTHER; note = 2'-O-methylguanosine-3'-phosphate
  modified_base 12: mod_base = OTHER; note = 2'-O-methyladenosine-3'-phosphate
  modified_base 13: mod_base = OTHER; note = 2'-O-methylcytidine-3'-phosphate
  modified_base 14: mod_base = OTHER; note = 2'-deoxy-2'-fluoroadenosine-3'-phosphate
  modified_base 15: mod_base = OTHER; note = 2'-O-methyladenosine-3'-phosphate
  modified_base 16: mod_base = OTHER; note = 2'-deoxy-2'-fluorocytidine-3'-phosphate
  modified_base 17: mod_base = OTHER; note = 2'-O-methylguanosine-3'-phosphate
  modified_base 18: mod_base = OTHER; note = 2'-O-methylguanosine-3'-phosphate
  modified_base 19: mod_base = OTHER; note = 2'-O-methylcytidine-3'-phosphate
  modified_base 20: mod_base = OTHER; note = 2'-O-methyluridine-3'-phosphate
  modified_base 21: mod_base = OTHER; note = 2'-O-methylcytidine-3'-phosphorothioate
  modified_base 22: mod_base = OTHER; note = 2'-O-methylguanosine-3'-phosphorothioate
  modified_base 23: mod_base = OTHER; note = 2'-O-methylguanosine
agtaattgtagacaacggctcgg

SEQ ID NO: 494 - RNA, 23 nt, synthetic construct
  source 1..23: mol_type = other RNA
  modified_base 1: mod_base = OTHER; note = 2'-O-methyladenosine-3'-phosphorothioate
  modified_base 2: mod_base = OTHER; note = 2'-deoxy-2'-fluoroguanosine-3'-phosphorothioate
  modified_base 3: mod_base = OTHER; note = 2'-O-methyluridine-3'-phosphate
  modified_base 4: mod_base = OTHER; note = 2'-O-methyladenosine-3'-phosphate
  modified_base 5: mod_base = OTHER; note = 2'-O-methyladenosine-3'-phosphate
  modified_base 6: mod_base = OTHER; note = 2'-deoxy-2'-fluorouridine-3'-phosphate
  modified_base 7: mod_base = OTHER; note = 2'-O-methyluridine-3'-phosphate
  modified_base 8: mod_base = OTHER; note = 2'-deoxy-2'-fluoroguanosine-3'-phosphate
  modified_base 9: mod_base = OTHER; note = 2'-deoxy-2'-fluorouridine-3'-phosphate
  modified_base 10: mod_base = OTHER; note = 2'-O-methyladenosine-3'-phosphate
  modified_base 11: mod_base = OTHER; note = 2'-O-methylguanosine-3'-phosphate
  modified_base 12: mod_base = OTHER; note = 2'-O-methyladenosine-3'-phosphate
  modified_base 13: mod_base = OTHER; note = 2'-O-methylguanosine-3'-phosphate
  modified_base 14: mod_base = OTHER; note = 2'-deoxy-2'-fluorouridine-3'-phosphate
  modified_base 15: mod_base = OTHER; note = 2'-O-methyladenosine-3'-phosphate
  modified_base 16: mod_base = OTHER; note = 2'-deoxy-2'-fluorocytidine-3'-phosphate
  modified_base 17: mod_base = OTHER; note = 2'-O-methylguanosine-3'-phosphate
  modified_base 18: mod_base = OTHER; note = 2'-O-methylguanosine-3'-phosphate
  modified_base 19: mod_base = OTHER; note = 2'-O-methylcytidine-3'-phosphate
  modified_base 20: mod_base = OTHER; note = 2'-O-methyluridine-3'-phosphate
  modified_base 21: mod_base = OTHER; note = 2'-O-methylcytidine-3'-phosphorothioate
  modified_base 22: mod_base = OTHER; note = 2'-O-methylguanosine-3'-phosphorothioate
  modified_base 23: mod_base = OTHER; note = 2'-O-methylguanosine
agtaattgtagagtacggctcgg

SEQ ID NO: 495 - RNA, 23 nt, synthetic construct
  source 1..23: mol_type = other RNA
  modified_base 1: mod_base = OTHER; note = 2'-O-methyladenosine-3'-phosphorothioate
  modified_base 2: mod_base = OTHER; note = 2'-deoxy-2'-fluoroguanosine-3'-phosphorothioate
  modified_base 3: mod_base = OTHER; note = 2'-O-methyluridine-3'-phosphate
  modified_base 4: mod_base = OTHER; note = 2'-O-methyladenosine-3'-phosphate
  modified_base 5: mod_base = OTHER; note = 2'-O-methyladenosine-3'-phosphate
  modified_base 6: mod_base = OTHER; note = 2'-deoxy-2'-fluorouridine-3'-phosphate
  modified_base 7: mod_base = OTHER; note = 2'-O-methyluridine-3'-phosphate
  modified_base 8: mod_base = OTHER; note = 2'-deoxy-2'-fluoroguanosine-3'-phosphate
  modified_base 9: mod_base = OTHER; note = 2'-deoxy-2'-fluorouridine-3'-phosphate
  modified_base 10: mod_base = OTHER; note = 2'-O-methyladenosine-3'-phosphate
  modified_base 11: mod_base = OTHER; note = 2'-O-methylguanosine-3'-phosphate
  modified_base 12: mod_base = OTHER; note = 2'-O-methyladenosine-3'-phosphate
  modified_base 13: mod_base = OTHER; note = 2'-O-methylguanosine-3'-phosphate
  modified_base 14: mod_base = OTHER; note = 2'-deoxy-2'-fluoroadenosine-3'-phosphate
  modified_base 15: mod_base = OTHER; note = 2'-O-methyluridine-3'-phosphate
  modified_base 16: mod_base = OTHER; note = 2'-deoxy-2'-fluorocytidine-3'-phosphate
  modified_base 17: mod_base = OTHER; note = 2'-O-methylguanosine-3'-phosphate
  modified_base 18: mod_base = OTHER; note = 2'-O-methylguanosine-3'-phosphate
  modified_base 19: mod_base = OTHER; note = 2'-O-methylcytidine-3'-phosphate
  modified_base 20: mod_base = OTHER; note = 2'-O-methyluridine-3'-phosphate
  modified_base 21: mod_base = OTHER; note = 2'-O-methylcytidine-3'-phosphorothioate
  modified_base 22: mod_base = OTHER; note = 2'-O-methylguanosine-3'-phosphorothioate
  modified_base 23: mod_base = OTHER; note = 2'-O-methylguanosine
agtaattgtagagatcggctcgg

SEQ ID NO: 496 - RNA, 23 nt, synthetic construct
  source 1..23: mol_type = other RNA
  modified_base 1: mod_base = OTHER; note = 2'-O-methyladenosine-3'-phosphorothioate
  modified_base 2: mod_base = OTHER; note = 2'-deoxy-2'-fluoroguanosine-3'-phosphorothioate
  modified_base 3: mod_base = OTHER; note = 2'-O-methyluridine-3'-phosphate
  modified_base 4: mod_base = OTHER; note = 2'-O-methyladenosine-3'-phosphate
  modified_base 5: mod_base = OTHER; note = 2'-O-methyladenosine-3'-phosphate
  modified_base 6: mod_base = OTHER; note = 2'-deoxy-2'-fluorouridine-3'-phosphate
  modified_base 7: mod_base = OTHER; note = 2'-O-methyluridine-3'-phosphate
  modified_base 8: mod_base = OTHER; note = 2'-deoxy-2'-fluoroguanosine-3'-phosphate
  modified_base 9: mod_base = OTHER; note = 2'-deoxy-2'-fluorouridine-3'-phosphate
  modified_base 10: mod_base = OTHER; note = 2'-O-methyladenosine-3'-phosphate
  modified_base 11: mod_base = OTHER; note = 2'-O-methylguanosine-3'-phosphate
  modified_base 12: mod_base = OTHER; note = 2'-O-methyladenosine-3'-phosphate
  modified_base 13: mod_base = OTHER; note = 2'-O-methylguanosine-3'-phosphate
  modified_base 14: mod_base = OTHER; note = 2'-deoxy-2'-fluoroadenosine-3'-phosphate
  modified_base 15: mod_base = OTHER; note = 2'-O-methyladenosine-3'-phosphate
  modified_base 16: mod_base = OTHER; note = 2'-deoxy-2'-fluoroguanosine-3'-phosphate
  modified_base 17: mod_base = OTHER; note = 2'-O-methylguanosine-3'-phosphate
  modified_base 18: mod_base = OTHER; note = 2'-O-methylguanosine-3'-phosphate
  modified_base 19: mod_base = OTHER; note = 2'-O-methylcytidine-3'-phosphate
  modified_base 20: mod_base = OTHER; note = 2'-O-methyluridine-3'-phosphate
  modified_base 21: mod_base = OTHER; note = 2'-O-methylcytidine-3'-phosphorothioate
  modified_base 22: mod_base = OTHER; note = 2'-O-methylguanosine-3'-phosphorothioate
  modified_base 23: mod_base = OTHER; note = 2'-O-methylguanosine
agtaattgtagagaagggctcgg

SEQ ID NO: 497 - DNA, 23 bp, synthetic construct
  source 1..23: mol_type = other DNA
  modified_base 1: mod_base = OTHER; note = 2'-O-methyladenosine-3'-phosphorothioate
  modified_base 2: mod_base = OTHER; note = 2'-deoxyguanosine-3'-phosphorothioate
  modified_base 3: mod_base = OTHER; note = 2'-O-methyluridine-3'-phosphate
  modified_base 4: mod_base = OTHER; note = 2'-O-methyladenosine-3'-phosphate
  modified_base 6: mod_base = OTHER; note = 2'-O-methyluridine-3'-phosphate
  modified_base 8: mod_base = OTHER; note = 2'-O-methylguanosine-3'-phosphate
  modified_base 9: mod_base = OTHER; note = 2'-O-methyluridine-3'-phosphate
  modified_base 10: mod_base = OTHER; note = 2'-O-methyladenosine-3'-phosphate
  modified_base 11: mod_base = OTHER; note = 2'-O-methylguanosine-3'-phosphate
  modified_base 13: mod_base = OTHER; note = 2'-O-methylguanosine-3'-phosphate
  modified_base 14: mod_base = OTHER; note = 2'-deoxy-2'-fluoroadenosine-3'-phosphate
  modified_base 15: mod_base = OTHER; note = 2'-O-methyladenosine-3'-phosphate
  modified_base 16: mod_base = OTHER; note = 2'-O-methylcytidine-3'-phosphate
  modified_base 17: mod_base = OTHER; note = 2'-O-methylguanosine-3'-phosphate
  modified_base 18: mod_base = OTHER; note = 2'-O-methylguanosine-3'-phosphate
  modified_base 19: mod_base = OTHER; note = 2'-O-methylcytidine-3'-phosphate
  modified_base 20: mod_base = OTHER; note = 2'-O-methyluridine-3'-phosphate
  modified_base 21: mod_base = OTHER; note = 2'-O-methylcytidine-3'-phosphorothioate
  modified_base 22: mod_base = OTHER; note = 2'-O-methylguanosine-3'-phosphorothioate
  modified_base 23: mod_base = OTHER; note = 2'-O-methylguanosine
  misc_feature 1: note = RNA
  misc_feature 3..4: note = RNA
  misc_feature 6: note = RNA
  misc_feature 8..11: note = RNA
  misc_feature 13..23: note = RNA
  misc_feature 2: note = DNA
  misc_feature 5: note = DNA
  misc_feature 7: note = DNA
  misc_feature 12: note = DNA
agtaattgtagagaacggctcgg

SEQ ID NO: 498 - DNA, 23 bp, synthetic construct
  source 1..23: mol_type = other DNA
  modified_base 1: mod_base = OTHER; note = 2'-O-methyluridine-3'-phosphorothioate
  modified_base 2: mod_base = OTHER; note = 2'-deoxyguanosine-3'-phosphorothioate
  modified_base 3: mod_base = OTHER; note = 2'-O-methyluridine-3'-phosphate
  modified_base 4: mod_base = OTHER; note = 2'-O-methyladenosine-3'-phosphate
  modified_base 6: mod_base = OTHER; note = 2'-O-methyluridine-3'-phosphate
  modified_base 8: mod_base = OTHER; note = 2'-O-methylguanosine-3'-phosphate
  modified_base 9: mod_base = OTHER; note = 2'-O-methyluridine-3'-phosphate
  modified_base 10: mod_base = OTHER; note = 2'-O-methyladenosine-3'-phosphate
  modified_base 11: mod_base = OTHER; note = 2'-O-methylguanosine-3'-phosphate
  modified_base 13: mod_base = OTHER; note = 2'-O-methylguanosine-3'-phosphate
  modified_base 14: mod_base = OTHER; note = 2'-deoxy-2'-fluoroadenosine-3'-phosphate
  modified_base 15: mod_base = OTHER; note = 2'-O-methyladenosine-3'-phosphate
  modified_base 16: mod_base = OTHER; note = 2'-O-methylcytidine-3'-phosphate
  modified_base 17: mod_base = OTHER; note = 2'-O-methylguanosine-3'-phosphate
  modified_base 18: mod_base = OTHER; note = 2'-O-methylguanosine-3'-phosphate
  modified_base 19: mod_base = OTHER; note = 2'-O-methylcytidine-3'-phosphate
  modified_base 20: mod_base = OTHER; note = 2'-O-methyluridine-3'-phosphate
  modified_base 21: mod_base = OTHER; note = 2'-O-methylcytidine-3'-phosphorothioate
  modified_base 22: mod_base = OTHER; note = 2'-O-methylguanosine-3'-phosphorothioate
  modified_base 23: mod_base = OTHER; note = 2'-O-methylguanosine
  misc_feature 1: note = RNA
  misc_feature 3..4: note = RNA
  misc_feature 6: note = RNA
  misc_feature 8..11: note = RNA
  misc_feature 13..23: note = RNA
  misc_feature 2: note = DNA
  misc_feature 5: note = DNA
  misc_feature 7: note = DNA
  misc_feature 12: note = DNA
tgtaattgtagagaacggctcgg

SEQ ID NO: 499 - DNA, 23 bp, synthetic construct
  source 1..23: mol_type = other DNA
  modified_base 1: mod_base = OTHER; note = 2'-O-methyladenosine-3'-phosphorothioate
  modified_base 2: mod_base = OTHER; note = 2'-deoxyguanosine-3'-phosphorothioate
  modified_base 3: mod_base = OTHER; note = 2'-O-methyluridine-3'-phosphate
  modified_base 4: mod_base = OTHER; note = 2'-O-methyladenosine-3'-phosphate
  modified_base 6: mod_base = OTHER; note = 2'-O-methyluridine-3'-phosphate
  modified_base 8: mod_base = OTHER; note = 2'-O-methylguanosine-3'-phosphate
  modified_base 9: mod_base = OTHER; note = 2'-O-methyluridine-3'-phosphate
  modified_base 10: mod_base = OTHER; note = 2'-O-methyladenosine-3'-phosphate
  modified_base 11: mod_base = OTHER; note = 2'-O-methylguanosine-3'-phosphate
  modified_base 13: mod_base = OTHER; note = 2'-O-methylguanosine-3'-phosphate
  modified_base 14: mod_base = OTHER; note = 2'-deoxy-2'-fluoroadenosine-3'-phosphate
  modified_base 15: mod_base = OTHER; note = 2'-O-methyladenosine-3'-phosphate
  modified_base 16: mod_base = OTHER; note = 2'-O-methylcytidine-3'-phosphate
  modified_base 17: mod_base = OTHER; note = 2'-O-methylcytidine-3'-phosphate
  modified_base 18: mod_base = OTHER; note = 2'-O-methylguanosine-3'-phosphate
  modified_base 19: mod_base = OTHER; note = 2'-O-methylcytidine-3'-phosphate
  modified_base 20: mod_base = OTHER; note = 2'-O-methyluridine-3'-phosphate
  modified_base 21: mod_base = OTHER; note = 2'-O-methylcytidine-3'-phosphorothioate
  modified_base 22: mod_base = OTHER; note = 2'-O-methylguanosine-3'-phosphorothioate
  modified_base 23: mod_base = OTHER; note = 2'-O-methylguanosine
  misc_feature 1: note = RNA
  misc_feature 3..4: note = RNA
  misc_feature 6: note = RNA
  misc_feature 8..11: note = RNA
  misc_feature 13..23: note = RNA
  misc_feature 2: note = DNA
  misc_feature 5: note = DNA
  misc_feature 7: note = DNA
  misc_feature 12: note = DNA
agtaattgtagagaaccgctcgg

SEQ ID NO: 500 - DNA, 23 bp, synthetic construct
  source 1..23: mol_type = other DNA
  modified_base 1: mod_base = OTHER; note = 2'-O-methyladenosine-3'-phosphorothioate
  modified_base 2: mod_base = OTHER; note = 2'-deoxyguanosine-3'-phosphorothioate
  modified_base 3: mod_base = OTHER; note = 2'-O-methyluridine-3'-phosphate
  modified_base 4: mod_base = OTHER; note = 2'-O-methyladenosine-3'-phosphate
  modified_base 6: mod_base = OTHER; note = 2'-O-methyluridine-3'-phosphate
  modified_base 8: mod_base = OTHER; note = 2'-O-methylguanosine-3'-phosphate
  modified_base 9: mod_base = OTHER; note = 2'-O-methyluridine-3'-phosphate
  modified_base 10: mod_base = OTHER; note = 2'-O-methyladenosine-3'-phosphate
  modified_base 11: mod_base = OTHER; note = 2'-O-methylguanosine-3'-phosphate
  modified_base 13: mod_base = OTHER; note = 2'-O-methylguanosine-3'-phosphate
  modified_base 14: mod_base = OTHER; note = 2'-deoxy-2'-fluoroadenosine-3'-phosphate
  modified_base 15: mod_base = OTHER; note = 2'-O-methyladenosine-3'-phosphate
  modified_base 16: mod_base = OTHER; note = 2'-O-methylcytidine-3'-phosphate
  modified_base 17: mod_base = OTHER; note = 2'-O-methylguanosine-3'-phosphate
  modified_base 18: mod_base = OTHER; note = 2'-O-methylcytidine-3'-phosphate
  modified_base 19: mod_base = OTHER; note = 2'-O-methylcytidine-3'-phosphate
  modified_base 20: mod_base = OTHER; note = 2'-O-methyluridine-3'-phosphate
  modified_base 21: mod_base = OTHER; note = 2'-O-methylcytidine-3'-phosphorothioate
  modified_base 22: mod_base = OTHER; note = 2'-O-methylguanosine-3'-phosphorothioate
  modified_base 23: mod_base = OTHER; note = 2'-O-methylguanosine
  misc_feature 1: note = RNA
  misc_feature 3..4: note = RNA
  misc_feature 6: note = RNA
  misc_feature 8..11: note = RNA
  misc_feature 13..23: note = RNA
  misc_feature 2: note = DNA
  misc_feature 5: note = DNA
  misc_feature 7: note = DNA
  misc_feature 12: note = DNA
agtaattgtagagaacgcctcgg

SEQ ID NO: 501 - DNA, 23 bp, synthetic construct
  source 1..23: mol_type = other DNA
  modified_base 1: mod_base = OTHER; note = 2'-O-methyladenosine-3'-phosphorothioate
  modified_base 2: mod_base = OTHER; note = 2'-deoxyguanosine-3'-phosphorothioate
  modified_base 3: mod_base = OTHER; note = 2'-O-methyluridine-3'-phosphate
  modified_base 4: mod_base = OTHER; note = 2'-O-methyladenosine-3'-phosphate
  modified_base 6: mod_base = OTHER; note = 2'-O-methyluridine-3'-phosphate
  modified_base 8: mod_base = OTHER; note = 2'-O-methylguanosine-3'-phosphate
  modified_base 9: mod_base = OTHER; note = 2'-O-methyluridine-3'-phosphate
  modified_base 10: mod_base = OTHER; note = 2'-O-methyladenosine-3'-phosphate
  modified_base 11: mod_base = OTHER; note = 2'-O-methylguanosine-3'-phosphate
  modified_base 13: mod_base = OTHER; note = 2'-O-methylguanosine-3'-phosphate
  modified_base 14: mod_base = OTHER; note = 2'-deoxy-2'-fluoroadenosine-3'-phosphate
  modified_base 15: mod_base = OTHER; note = 2'-O-methyladenosine-3'-phosphate
  modified_base 16: mod_base = OTHER; note = 2'-O-methylcytidine-3'-phosphate
  modified_base 17: mod_base = OTHER; note = 2'-O-methylguanosine-3'-phosphate
  modified_base 18: mod_base = OTHER; note = 2'-O-methylguanosine-3'-phosphate
  modified_base 19: mod_base = OTHER; note = 2'-O-methylguanosine-3'-phosphate
  modified_base 20: mod_base = OTHER; note = 2'-O-methyluridine-3'-phosphate
  modified_base 21: mod_base = OTHER; note = 2'-O-methylcytidine-3'-phosphorothioate
  modified_base 22: mod_base = OTHER; note = 2'-O-methylguanosine-3'-phosphorothioate
  modified_base 23: mod_base = OTHER; note = 2'-O-methylguanosine
  misc_feature 1: note = RNA
  misc_feature 3..4: note = RNA
  misc_feature 6: note = RNA
  misc_feature 8..11: note = RNA
  misc_feature 13..23: note = RNA
  misc_feature 2: note = DNA
  misc_feature 5: note = DNA
  misc_feature 7: note = DNA
  misc_feature 12: note = DNA
agtaattgtagagaacgggtcgg

SEQ ID NO: 502 - DNA, 23 bp, synthetic construct
  source 1..23: mol_type = other DNA
  modified_base 1: mod_base = OTHER; note = 2'-O-methyladenosine-3'-phosphorothioate
  modified_base 2: mod_base = OTHER; note = 2'-deoxyguanosine-3'-phosphorothioate
  modified_base 3: mod_base = OTHER; note = 2'-O-methyluridine-3'-phosphate
  modified_base 4: mod_base = OTHER; note = 2'-O-methyladenosine-3'-phosphate
  modified_base 6: mod_base = OTHER; note = 2'-O-methyluridine-3'-phosphate
  modified_base 7: mod_base = OTHER; note = Thymidine-glycol nucleic acid (GNA), S-Isomer
  modified_base 8: mod_base = OTHER; note = 2'-O-methylguanosine-3'-phosphate
  modified_base 9: mod_base = OTHER; note = 2'-O-methyluridine-3'-phosphate
  modified_base 10: mod_base = OTHER; note = 2'-O-methyladenosine-3'-phosphate
  modified_base 11: mod_base = OTHER; note = 2'-O-methylguanosine-3'-phosphate
  modified_base 13: mod_base = OTHER; note = 2'-O-methylguanosine-3'-phosphate
  modified_base 14: mod_base = OTHER; note = 2'-deoxy-2'-fluoroadenosine-3'-phosphate
  modified_base 15: mod_base = OTHER; note = 2'-O-methyladenosine-3'-phosphate
  modified_base 16: mod_base = OTHER; note = 2'-O-methylcytidine-3'-phosphate
  modified_base 17: mod_base = OTHER; note = 2'-O-methylguanosine-3'-phosphate
  modified_base 18: mod_base = OTHER; note = 2'-O-methylguanosine-3'-phosphate
  modified_base 19: mod_base = OTHER; note = 2'-O-methylcytidine-3'-phosphate
  modified_base 20: mod_base = OTHER; note = 2'-O-methyluridine-3'-phosphate
  modified_base 21: mod_base = OTHER; note = 2'-O-methylcytidine-3'-phosphorothioate
  modified_base 22: mod_base = OTHER; note = 2'-O-methylguanosine-3'-phosphorothioate
  modified_base 23: mod_base = OTHER; note = 2'-O-methylguanosine
  misc_feature 1: note = RNA
  misc_feature 3..4: note = RNA
  misc_feature 6..11: note = RNA
  misc_feature 13..23: note = RNA
  misc_feature 2: note = DNA
  misc_feature 5: note = DNA
  misc_feature 12: note = DNA
agtaattgtagagaacggctcgg

SEQ ID NO: 503 - DNA, 23 bp, synthetic construct
  source 1..23: mol_type = other DNA
  modified_base 1: mod_base = OTHER; note = 2'-O-methyladenosine-3'-phosphorothioate
  modified_base 2: mod_base = OTHER; note = 2'-deoxyguanosine-3'-phosphorothioate
  modified_base 3: mod_base = OTHER; note = 2'-O-methyluridine-3'-phosphate
  modified_base 4: mod_base = OTHER; note = 2'-O-methyladenosine-3'-phosphate
  modified_base 6: mod_base = OTHER; note = 2'-O-methyluridine-3'-phosphate
  modified_base 7: mod_base = OTHER; note = uridine-2'-phosphate
  modified_base 8: mod_base = OTHER; note = 2'-O-methylguanosine-3'-phosphate
  modified_base 9: mod_base = OTHER; note = 2'-O-methyluridine-3'-phosphate
  modified_base 10: mod_base = OTHER; note = 2'-O-methyladenosine-3'-phosphate
  modified_base 11: mod_base = OTHER; note = 2'-O-methylguanosine-3'-phosphate
  modified_base 13: mod_base = OTHER; note = 2'-O-methylguanosine-3'-phosphate
  modified_base 14: mod_base = OTHER; note = 2'-deoxy-2'-fluoroadenosine-3'-phosphate
  modified_base 15: mod_base = OTHER; note = 2'-O-methyladenosine-3'-phosphate
  modified_base 16: mod_base = OTHER; note = 2'-O-methylcytidine-3'-phosphate
  modified_base 17: mod_base = OTHER; note = 2'-O-methylguanosine-3'-phosphate
  modified_base 18: mod_base = OTHER; note = 2'-O-methylguanosine-3'-phosphate
  modified_base 19: mod_base = OTHER; note = 2'-O-methylcytidine-3'-phosphate
  modified_base 20: mod_base = OTHER; note = 2'-O-methyluridine-3'-phosphate
  modified_base 21: mod_base = OTHER; note = 2'-O-methylcytidine-3'-phosphorothioate
  modified_base 22: mod_base = OTHER; note = 2'-O-methylguanosine-3'-phosphorothioate
  modified_base 23: mod_base = OTHER; note = 2'-O-methylguanosine
  misc_feature 1: note = RNA
  misc_feature 3..4: note = RNA
  misc_feature 6..11: note = RNA
  misc_feature 13..23: note = RNA
  misc_feature 2: note = DNA
  misc_feature 5: note = DNA
  misc_feature 12: note = DNA
agtaattgtagagaacggctcgg

SEQ ID NO: 504 - DNA, 23 bp, synthetic construct
  source 1..23: mol_type = other DNA
  modified_base 1: mod_base = OTHER; note = 2'-O-methyluridine-3'-phosphorothioate
  modified_base 2: mod_base = OTHER; note = 2'-deoxyguanosine-3'-phosphorothioate
  modified_base 3: mod_base = OTHER; note = 2'-O-methyluridine-3'-phosphate
  modified_base 4: mod_base = OTHER; note = 2'-O-methyladenosine-3'-phosphate
  modified_base 6: mod_base = OTHER; note = 2'-O-methyluridine-3'-phosphate
  modified_base 7: mod_base = OTHER; note = uridine-2'-phosphate
  modified_base 8: mod_base = OTHER; note = 2'-O-methylguanosine-3'-phosphate
  modified_base 9: mod_base = OTHER; note = 2'-O-methyluridine-3'-phosphate
  modified_base 10: mod_base = OTHER; note = 2'-O-methyladenosine-3'-phosphate
  modified_base 11: mod_base = OTHER; note = 2'-O-methylguanosine-3'-phosphate
  modified_base 13: mod_base = OTHER; note = 2'-O-methylguanosine-3'-phosphate
  modified_base 14: mod_base = OTHER; note = 2'-deoxy-2'-fluoroadenosine-3'-phosphate
  modified_base 15: mod_base = OTHER; note = 2'-O-methyladenosine-3'-phosphate
  modified_base 16: mod_base = OTHER; note = 2'-O-methylcytidine-3'-phosphate
  modified_base 17: mod_base = OTHER; note = 2'-O-methylguanosine-3'-phosphate
  modified_base 18: mod_base = OTHER; note = 2'-O-methylguanosine-3'-phosphate
  modified_base 19: mod_base = OTHER; note = 2'-O-methylcytidine-3'-phosphate
  modified_base 20: mod_base = OTHER; note = 2'-O-methyluridine-3'-phosphate
  modified_base 21: mod_base = OTHER; note = 2'-O-methylcytidine-3'-phosphorothioate
  modified_base 22: mod_base = OTHER; note = 2'-O-methylguanosine-3'-phosphorothioate
  modified_base 23: mod_base = OTHER; note = 2'-O-methylguanosine
  misc_feature 1: note = RNA
  misc_feature 3..4: note = RNA
  misc_feature 6..11: note = RNA
  misc_feature 13..23: note = RNA
  misc_feature 2: note = DNA
  misc_feature 5: note = DNA
  misc_feature 12: note = DNA
tgtaattgtagagaacggctcgg

SEQ ID NO: 505 - DNA, 23 bp, synthetic construct
  source 1..23: mol_type = other DNA
  modified_base 1: mod_base = OTHER; note = 2'-O-methyladenosine-3'-phosphorothioate
  modified_base 2: mod_base = OTHER; note = 2'-deoxyguanosine-3'-phosphorothioate
  modified_base 3: mod_base = OTHER; note = 2'-O-methyluridine-3'-phosphate
  modified_base 4: mod_base = OTHER; note = 2'-O-methyladenosine-3'-phosphate
  modified_base 6: mod_base = OTHER; note = 2'-O-methyluridine-3'-phosphate
  modified_base 8: mod_base = OTHER; note = 2'-O-methylguanosine-3'-phosphate
  modified_base 9: mod_base = OTHER; note = 2'-O-methyluridine-3'-phosphate
  modified_base 10: mod_base = OTHER; note = 2'-O-methyladenosine-3'-phosphate
  modified_base 11: mod_base = OTHER; note = 2'-O-methylguanosine-3'-phosphate
  modified_base 13: mod_base = OTHER; note = guanosine-2'-phosphate
  modified_base 14: mod_base = OTHER; note = 2'-deoxy-2'-fluoroadenosine-3'-phosphate
  modified_base 15: mod_base = OTHER; note = 2'-O-methyladenosine-3'-phosphate
  modified_base 16: mod_base = OTHER; note = 2'-O-methylcytidine-3'-phosphate
  modified_base 17: mod_base = OTHER; note = 2'-O-methylguanosine-3'-phosphate
  modified_base 18: mod_base = OTHER; note = 2'-O-methylguanosine-3'-phosphate
  modified_base 19: mod_base = OTHER; note = 2'-O-methylcytidine-3'-phosphate
  modified_base 20: mod_base = OTHER; note = 2'-O-methyluridine-3'-phosphate
  modified_base 21: mod_base = OTHER; note = 2'-O-methylcytidine-3'-phosphorothioate
  modified_base 22: mod_base = OTHER; note = 2'-O-methylguanosine-3'-phosphorothioate
  modified_base 23: mod_base = OTHER; note = 2'-O-methylguanosine
  misc_feature 1: note = RNA
  misc_feature 3..4: note = RNA
  misc_feature 6: note = RNA
  misc_feature 8..11: note = RNA
  misc_feature 13..23: note = RNA
  misc_feature 2: note = DNA
  misc_feature 5: note = DNA
  misc_feature 7: note = DNA
  misc_feature 12: note = DNA
agtaattgtagagaacggctcgg

SEQ ID NO: 506 - DNA, 23 bp, synthetic construct
  source 1..23: mol_type = other DNA
  modified_base 1: mod_base = OTHER; note = 2'-O-methyladenosine-3'-phosphorothioate
  modified_base 2: mod_base = OTHER; note = 2'-deoxyguanosine-3'-phosphorothioate
  modified_base 3: mod_base = OTHER; note = 2'-O-methyluridine-3'-phosphate
  modified_base 4: mod_base = OTHER; note = 2'-O-methyladenosine-3'-phosphate
  modified_base 6: mod_base = OTHER; note = 2'-O-methyluridine-3'-phosphate
  modified_base 8: mod_base = OTHER; note = 2'-O-methylguanosine-3'-phosphate
  modified_base 9: mod_base = OTHER; note = 2'-O-methyluridine-3'-phosphate
  modified_base 10: mod_base = OTHER; note = 2'-O-methyladenosine-3'-phosphate
  modified_base 11: mod_base = OTHER; note = 2'-O-methylguanosine-3'-phosphate
  modified_base 13: mod_base = OTHER; note = 2'-O-methylguanosine-3'-phosphate
  modified_base 14: mod_base = OTHER; note = adenosine-2'-phosphate
  modified_base 15: mod_base = OTHER; note = 2'-O-methyladenosine-3'-phosphate
  modified_base 16: mod_base = OTHER; note = 2'-O-methylcytidine-3'-phosphate
  modified_base 17: mod_base = OTHER; note = 2'-O-methylguanosine-3'-phosphate
  modified_base 18: mod_base = OTHER; note = 2'-O-methylguanosine-3'-phosphate
  modified_base 19: mod_base = OTHER; note = 2'-O-methylcytidine-3'-phosphate
  modified_base 20: mod_base = OTHER; note = 2'-O-methyluridine-3'-phosphate
  modified_base 21: mod_base = OTHER; note = 2'-O-methylcytidine-3'-phosphorothioate
  modified_base 22: mod_base = OTHER; note = 2'-O-methylguanosine-3'-phosphorothioate
  modified_base 23: mod_base = OTHER; note = 2'-O-methylguanosine
  misc_feature 1: note = RNA
  misc_feature 3..4: note = RNA
  misc_feature 6: note = RNA
  misc_feature 8..11: note = RNA
  misc_feature 13..23: note = RNA
  misc_feature 2: note = DNA
  misc_feature 5: note = DNA
  misc_feature 7: note = DNA
  misc_feature 12: note = DNA
agtaattgtagagaacggctcgg

SEQ ID NO: 507 - DNA, 23 bp, synthetic construct
  source 1..23: mol_type = other DNA
  modified_base 1: mod_base = OTHER; note = 2'-O-methyladenosine-3'-phosphorothioate
  modified_base 2: mod_base = OTHER; note = 2'-deoxyguanosine-3'-phosphorothioate
  modified_base 3: mod_base = OTHER; note = 2'-O-methyluridine-3'-phosphate
  modified_base 4: mod_base = OTHER; note = 2'-O-methyladenosine-3'-phosphate
  modified_base 6: mod_base = OTHER; note = 2'-O-methyluridine-3'-phosphate
  modified_base 8: mod_base = OTHER; note = 2'-O-methylguanosine-3'-phosphate
  modified_base 9: mod_base = OTHER; note = 2'-O-methyluridine-3'-phosphate
  modified_base 10: mod_base = OTHER; note = 2'-O-methyladenosine-3'-phosphate
  modified_base 11: mod_base = OTHER; note = 2'-O-methylguanosine-3'-phosphate
  modified_base 13: mod_base = OTHER; note = 2'-O-methylguanosine-3'-phosphate
  modified_base 14: mod_base = OTHER; note = 2'-deoxy-2'-fluoroadenosine-3'-phosphate
  modified_base 15: mod_base = OTHER; note = adenosine-2'-phosphate
  modified_base 16: mod_base = OTHER; note = 2'-O-methylcytidine-3'-phosphate
  modified_base 17: mod_base = OTHER; note = 2'-O-methylguanosine-3'-phosphate
  modified_base 18: mod_base = OTHER; note = 2'-O-methylguanosine-3'-phosphate
  modified_base 19: mod_base = OTHER; note = 2'-O-methylcytidine-3'-phosphate
  modified_base 20: mod_base = OTHER; note = 2'-O-methyluridine-3'-phosphate
  modified_base 21: mod_base = OTHER; note = 2'-O-methylcytidine-3'-phosphorothioate
  modified_base 22: mod_base = OTHER; note = 2'-O-methylguanosine-3'-phosphorothioate
  modified_base 23: mod_base = OTHER; note = 2'-O-methylguanosine
  misc_feature 1: note = RNA
  misc_feature 3..4: note = RNA
  misc_feature 6: note = RNA
  misc_feature 8..11: note = RNA
  misc_feature 13..23: note = RNA
  misc_feature 2: note = DNA
  misc_feature 5: note = DNA
  misc_feature 7: note = DNA
  misc_feature 12: note = DNA
agtaattgtagagaacggctcgg

SEQ ID NO: 508 - DNA, 23 bp, synthetic construct
  source 1..23: mol_type = other DNA
  modified_base 1: mod_base = OTHER; note = 2'-O-methyladenosine-3'-phosphorothioate
  modified_base 2: mod_base = OTHER; note = 2'-deoxyguanosine-3'-phosphorothioate
  modified_base 3: mod_base = OTHER; note = 2'-O-methyluridine-3'-phosphate
  modified_base 4: mod_base = OTHER; note = 2'-O-methyladenosine-3'-phosphate
  modified_base 6: mod_base = OTHER; note = 2'-O-methyluridine-3'-phosphate
  modified_base 8: mod_base = OTHER; note = 2'-O-methylguanosine-3'-phosphate
  modified_base 9: mod_base = OTHER; note = 2'-O-methyluridine-3'-phosphate
  modified_base 10: mod_base = OTHER; note = 2'-O-methyladenosine-3'-phosphate
  modified_base 11: mod_base = OTHER; note = 2'-O-methylguanosine-3'-phosphate
  modified_base 13: mod_base = OTHER; note = 2'-O-methylguanosine-3'-phosphate
  modified_base 14: mod_base = OTHER; note = 2'-deoxy-2'-fluoroadenosine-3'-phosphate
  modified_base 15: mod_base = OTHER; note = 2'-O-methyladenosine-3'-phosphate
  modified_base 16: mod_base = OTHER; note = cytidine-2'-phosphate
  modified_base 17: mod_base = OTHER; note = 2'-O-methylguanosine-3'-phosphate
  modified_base 18: mod_base = OTHER; note = 2'-O-methylguanosine-3'-phosphate
  modified_base 19: mod_base = OTHER; note = 2'-O-methylcytidine-3'-phosphate
  modified_base 20: mod_base = OTHER; note = 2'-O-methyluridine-3'-phosphate
  modified_base 21: mod_base = OTHER; note = 2'-O-methylcytidine-3'-phosphorothioate
  modified_base 22: mod_base = OTHER; note = 2'-O-methylguanosine-3'-phosphorothioate
  modified_base 23: mod_base = OTHER; note = 2'-O-methylguanosine
  misc_feature 1: note = RNA
  misc_feature 3..4: note = RNA
  misc_feature 6: note = RNA
  misc_feature 8..11: note = RNA
  misc_feature 13..23: note = RNA
  misc_feature 2: note = DNA
  misc_feature 5: note = DNA
  misc_feature 7: note = DNA
  misc_feature 12: note = DNA
agtaattgtagagaacggctcgg

SEQ ID NO: 509 - DNA, 23 bp, synthetic construct
  source 1..23: mol_type = other DNA
  modified_base 1: mod_base = OTHER; note = 2'-O-methyladenosine-3'-phosphorothioate
  modified_base 2: mod_base = OTHER; note = 2'-deoxythymidine-3'-phosphorothioate
  modified_base 3: mod_base = OTHER; note = 2'-O-methyladenosine-3'-phosphate
  modified_base 4: mod_base = OTHER; note = 2'-O-methylguanosine-3'-phosphate
  modified_base 6: mod_base = OTHER; note = 2'-O-methyluridine-3'-phosphate
  modified_base 8: mod_base = OTHER; note = 2'-O-methyluridine-3'-phosphate
  modified_base 9: mod_base = OTHER; note = 2'-O-methyladenosine-3'-phosphate
  modified_base 10: mod_base = OTHER; note = 2'-O-methylguanosine-3'-phosphate
  modified_base 11: mod_base = OTHER; note = 2'-O-methyluridine-3'-phosphate
  modified_base 13: mod_base = OTHER; note = 2'-O-methylguanosine-3'-phosphate
  modified_base 14: mod_base = OTHER; note = 2'-deoxy-2'-fluoroadenosine-3'-phosphate
  modified_base 15: mod_base = OTHER; note = 2'-O-methyladenosine-3'-phosphate
  modified_base 16: mod_base = OTHER; note = 2'-O-methyluridine-3'-phosphate
  modified_base 17: mod_base = OTHER; note = 2'-O-methyluridine-3'-phosphate
  modified_base 18: mod_base = OTHER; note = 2'-O-methyluridine-3'-phosphate
  modified_base 19: mod_base = OTHER; note = 2'-O-methylcytidine-3'-phosphate
  modified_base 20: mod_base = OTHER; note = 2'-O-methyluridine-3'-phosphate
  modified_base 21: mod_base = OTHER; note = 2'-O-methylcytidine-3'-phosphorothioate
  modified_base 22: mod_base = OTHER; note = 2'-O-methyluridine-3'-phosphorothioate
  modified_base 23: mod_base = OTHER; note = 2'-O-methylguanosine
  misc_feature 1: note = RNA
  misc_feature 3..4: note = RNA
  misc_feature 6: note = RNA
  misc_feature 8..11: note = RNA
  misc_feature 13..23: note = RNA
  misc_feature 2: note = DNA
  misc_feature 5: note = DNA
  misc_feature 7: note = DNA
  misc_feature 12: note = DNA
atagatgtagtagaatttctctg

SEQ ID NO: 510 - DNA, 23 bp, synthetic construct
  source 1..23: mol_type = other DNA
  modified_base 1: mod_base = OTHER; note = 2'-O-methyluridine-3'-phosphorothioate
  modified_base 2: mod_base = OTHER; note = 2'-deoxythymidine-3'-phosphorothioate
  modified_base 3: mod_base = OTHER; note = 2'-O-methyladenosine-3'-phosphate
  modified_base 4: mod_base = OTHER; note = 2'-O-methylguanosine-3'-phosphate
  modified_base 6: mod_base = OTHER; note = 2'-O-methyluridine-3'-phosphate
  modified_base 8: mod_base = OTHER; note = 2'-O-methyluridine-3'-phosphate
  modified_base 9: mod_base = OTHER; note = 2'-O-methyladenosine-3'-phosphate
  modified_base 10: mod_base = OTHER; note = 2'-O-methylguanosine-3'-phosphate
  modified_base 11: mod_base = OTHER; note = 2'-O-methyluridine-3'-phosphate
  modified_base 13: mod_base = OTHER; note = 2'-O-methylguanosine-3'-phosphate
  modified_base 14: mod_base = OTHER; note = 2'-deoxy-2'-fluoroadenosine-3'-phosphate
  modified_base 15: mod_base = OTHER; note = 2'-O-methyladenosine-3'-phosphate
  modified_base 16: mod_base = OTHER; note = 2'-O-methyluridine-3'-phosphate
  modified_base 17: mod_base = OTHER; note = 2'-O-methyluridine-3'-phosphate
  modified_base 18: mod_base = OTHER; note = 2'-O-methyluridine-3'-phosphate
  modified_base 19: mod_base = OTHER; note = 2'-O-methylcytidine-3'-phosphate
  modified_base 20: mod_base = OTHER; note = 2'-O-methyluridine-3'-phosphate
  modified_base 21: mod_base = OTHER; note = 2'-O-methylcytidine-3'-phosphorothioate
  modified_base 22: mod_base = OTHER; note = 2'-O-methyluridine-3'-phosphorothioate
  modified_base 23: mod_base = OTHER; note = 2'-O-methylguanosine
  misc_feature 1: note = RNA
  misc_feature 3..4: note = RNA
  misc_feature 6: note = RNA
  misc_feature 8..11: note = RNA
  misc_feature 13..23: note = RNA
  misc_feature 2: note = DNA
  misc_feature 5: note = DNA
  misc_feature 7: note = DNA
  misc_feature 12: note = DNA
ttagatgtagtagaatttctctg

SEQ ID NO: 511 - DNA, 23 bp, synthetic construct
  source 1..23: mol_type = other DNA
  modified_base 1: mod_base = OTHER; note = 2'-O-methyladenosine-3'-phosphorothioate
  modified_base 2: mod_base = OTHER; note = 2'-deoxythymidine-3'-phosphorothioate
  modified_base 3: mod_base = OTHER; note = 2'-O-methyladenosine-3'-phosphate
  modified_base 4: mod_base = OTHER; note = 2'-O-methylguanosine-3'-phosphate
  modified_base 6: mod_base = OTHER; note = 2'-O-methyluridine-3'-phosphate
  modified_base 8: mod_base = OTHER; note = 2'-O-methyluridine-3'-phosphate
  modified_base 9: mod_base = OTHER; note = 2'-O-methyladenosine-3'-phosphate
  modified_base 10: mod_base = OTHER; note = 2'-O-methylguanosine-3'-phosphate
  modified_base 11: mod_base = OTHER; note = 2'-O-methyluridine-3'-phosphate
  modified_base 13: mod_base = OTHER; note = 2'-O-methylguanosine-3'-phosphate
  modified_base 14: mod_base = OTHER; note = 2'-deoxy-2'-fluoroadenosine-3'-phosphate
  modified_base 15: mod_base = OTHER; note = 2'-O-methyladenosine-3'-phosphate
  modified_base 16: mod_base = OTHER; note = 2'-O-methyluridine-3'-phosphate
  modified_base 17: mod_base = OTHER; note = 2'-O-methyluridine-3'-phosphate
  modified_base 18: mod_base = OTHER; note = 2'-O-methyluridine-3'-phosphate
  modified_base 19: mod_base = OTHER; note = 2'-O-methylcytidine-3'-phosphate
  modified_base 20: mod_base = OTHER; note = 2'-O-methyluridine-3'-phosphate
  modified_base 21: mod_base = OTHER; note = 2'-O-methylcytidine-3'-phosphorothioate
  modified_base 22: mod_base = OTHER; note = 2'-O-methylcytidine-3'-phosphorothioate
  modified_base 23: mod_base = OTHER; note = 2'-O-methyluridine
  misc_feature 1: note = RNA
  misc_feature 3..4: note = RNA
  misc_feature 6: note = RNA
  misc_feature 8..11: note = RNA
  misc_feature 13..23: note = RNA
  misc_feature 2: note = DNA
  misc_feature 5: note = DNA
  misc_feature 7: note = DNA
  misc_feature 12: note = DNA
atagatgtagtagaatttctcct

SEQ ID NO: 512 - DNA, 21 bp, synthetic construct
  source 1..21: mol_type = other DNA
  modified_base 1: mod_base = OTHER; note = 2'-O-methyladenosine-3'-phosphorothioate
  modified_base 2: mod_base = OTHER; note = 2'-deoxythymidine-3'-phosphorothioate
  modified_base 3: mod_base = OTHER; note = 2'-O-methyladenosine-3'-phosphate
  modified_base 4: mod_base = OTHER; note = 2'-O-methylguanosine-3'-phosphate
  modified_base 6: mod_base = OTHER; note = 2'-O-methyluridine-3'-phosphate
  modified_base 8: mod_base = OTHER; note = 2'-O-methyluridine-3'-phosphate
  modified_base 9: mod_base = OTHER; note = 2'-O-methyladenosine-3'-phosphate
  modified_base 10: mod_base = OTHER; note = 2'-O-methylguanosine-3'-phosphate
  modified_base 11: mod_base = OTHER; note = 2'-O-methyluridine-3'-phosphate
  modified_base 13: mod_base = OTHER; note = 2'-O-methylguanosine-3'-phosphate
  modified_base 14: mod_base = OTHER; note = 2'-deoxy-2'-fluoroadenosine-3'-phosphate
  modified_base 15: mod_base = OTHER; note = 2'-O-methyladenosine-3'-phosphate
  modified_base 16: mod_base = OTHER; note = 2'-O-methyluridine-3'-phosphate
  modified_base 17: mod_base = OTHER; note = 2'-O-methyluridine-3'-phosphate
  modified_base 18: mod_base = OTHER; note = 2'-O-methyluridine-3'-phosphate
  modified_base 19: mod_base = OTHER; note = 2'-O-methylcytidine-3'-phosphorothioate
  modified_base 20: mod_base = OTHER; note = 2'-O-methyluridine-3'-phosphorothioate
  modified_base 21: mod_base = OTHER; note = 2'-O-methylcytidine
  misc_feature 1: note = RNA
  misc_feature 3..4: note = RNA
  misc_feature 6: note = RNA
  misc_feature 8..11: note = RNA
  misc_feature 13..21: note = RNA
  misc_feature 2: note = DNA
  misc_feature 5: note = DNA
  misc_feature 7: note = DNA
  misc_feature 12: note = DNA
atagatgtagtagaatttctc

SEQ ID NO: 513 - DNA, 23 bp, synthetic construct
  source 1..23: mol_type = other DNA
  modified_base 1: mod_base = OTHER; note = 2'-O-methyladenosine-3'-phosphorothioate
  modified_base 2: mod_base = OTHER; note = 2'-deoxythymidine-3'-phosphorothioate
  modified_base 3: mod_base = OTHER; note = 2'-O-methyladenosine-3'-phosphate
  modified_base 4: mod_base = OTHER; note = 2'-O-methylguanosine-3'-phosphate
  modified_base 6: mod_base = OTHER; note = 2'-O-methyluridine-3'-phosphate
  modified_base 8: mod_base = OTHER; note = 2'-O-methyluridine-3'-phosphate
  modified_base 9: mod_base = OTHER; note = 2'-O-methyladenosine-3'-phosphate
  modified_base 10: mod_base = OTHER; note = 2'-O-methylguanosine-3'-phosphate
  modified_base 11: mod_base = OTHER; note = 2'-O-methyluridine-3'-phosphate
  modified_base 13: mod_base = OTHER; note = 2'-O-methylguanosine-3'-phosphate
  modified_base 14: mod_base = OTHER; note = 2'-deoxy-2'-fluoroadenosine-3'-phosphate
  modified_base 15: mod_base = OTHER; note = 2'-O-methyladenosine-3'-phosphate
  modified_base 16: mod_base = OTHER; note = 2'-O-methyluridine-3'-phosphate
  modified_base 17: mod_base = OTHER; note = 2'-O-methyladenosine-3'-phosphate
  modified_base 18: mod_base = OTHER; note = 2'-O-methyluridine-3'-phosphate
  modified_base 19: mod_base = OTHER; note = 2'-O-methylcytidine-3'-phosphate
  modified_base 20: mod_base = OTHER; note = 2'-O-methyluridine-3'-phosphate
  modified_base 21: mod_base = OTHER; note = 2'-O-methylcytidine-3'-phosphorothioate
  modified_base 22: mod_base = OTHER; note = 2'-O-methyluridine-3'-phosphorothioate
  modified_base 23: mod_base = OTHER; note = 2'-O-methylguanosine
  misc_feature 1: note = RNA
  misc_feature 3..4: note = RNA
  misc_feature 6: note = RNA
  misc_feature 8..11: note = RNA
  misc_feature 13..23: note = RNA
  misc_feature 2: note = DNA
  misc_feature 5: note = DNA
  misc_feature 7: note = DNA
  misc_feature 12: note = DNA
atagatgtagtagaatatctctg

SEQ ID NO: 514 - DNA, 23 bp, synthetic construct
  source 1..23: mol_type = other DNA
  modified_base 1: mod_base = OTHER; note = 2'-O-methyladenosine-3'-phosphorothioate
  modified_base 2: mod_base = OTHER; note = 2'-deoxythymidine-3'-phosphorothioate
  modified_base 3: mod_base = OTHER; note = 2'-O-methyladenosine-3'-phosphate
  modified_base 4: mod_base = OTHER; note = 2'-O-methylguanosine-3'-phosphate
  modified_base 6: mod_base = OTHER; note = 2'-O-methyluridine-3'-phosphate
  modified_base 8: mod_base = OTHER; note = 2'-O-methyluridine-3'-phosphate
  modified_base 9: mod_base = OTHER; note = 2'-O-methyladenosine-3'-phosphate
  modified_base 10: mod_base = OTHER; note = 2'-O-methylguanosine-3'-phosphate
  modified_base 11: mod_base = OTHER; note = 2'-O-methyluridine-3'-phosphate
  modified_base 13: mod_base = OTHER; note = 2'-O-methylguanosine-3'-phosphate
  modified_base 14: mod_base = OTHER; note = 2'-deoxy-2'-fluoroadenosine-3'-phosphate
  modified_base 15: mod_base = OTHER; note = 2'-O-methyladenosine-3'-phosphate
  modified_base 16: mod_base = OTHER; note = 2'-O-methyluridine-3'-phosphate
  modified_base 17: mod_base = OTHER; note = 2'-O-methyluridine-3'-phosphate
  modified_base 18: mod_base = OTHER; note = 2'-O-methyladenosine-3'-phosphate
  modified_base 19: mod_base = OTHER; note = 2'-O-methylcytidine-3'-phosphate
  modified_base 20: mod_base = OTHER; note = 2'-O-methyluridine-3'-phosphate
  modified_base 21: mod_base = OTHER; note = 2'-O-methylcytidine-3'-phosphorothioate
  modified_base 22: mod_base = OTHER; note = 2'-O-methyluridine-3'-phosphorothioate
  modified_base 23: mod_base = OTHER; note = 2'-O-methylguanosine
  misc_feature 1: note = RNA
  misc_feature 3..4: note = RNA
  misc_feature 6: note = RNA
  misc_feature 8..11: note = RNA
  misc_feature 13..23: note = RNA
  misc_feature 2: note = DNA
  misc_feature 5: note = DNA
  misc_feature 7: note = DNA
  misc_feature 12: note = DNA
atagatgtagtagaattactctg

SEQ ID NO: 515 - DNA, 23 bp, synthetic construct
  source 1..23: mol_type = other DNA
  modified_base 1: mod_base = OTHER; note = 2'-O-methyladenosine-3'-phosphorothioate
  modified_base 2: mod_base = OTHER; note = 2'-deoxythymidine-3'-phosphorothioate
  modified_base 3: mod_base = OTHER; note = 2'-O-methyladenosine-3'-phosphate
  modified_base 4: mod_base = OTHER; note = 2'-O-methylguanosine-3'-phosphate
  modified_base 6: mod_base = OTHER; note = 2'-O-methyluridine-3'-phosphate
  modified_base 8: mod_base = OTHER; note = 2'-O-methyluridine-3'-phosphate
  modified_base 9: mod_base = OTHER; note = 2'-O-methyladenosine-3'-phosphate
  modified_base 10: mod_base = OTHER; note = 2'-O-methylguanosine-3'-phosphate
  modified_base 11: mod_base = OTHER; note = 2'-O-methyluridine-3'-phosphate
  modified_base 13: mod_base = OTHER; note = 2'-O-methylguanosine-3'-phosphate
  modified_base 14: mod_base = OTHER; note = 2'-deoxy-2'-fluoroadenosine-3'-phosphate
  modified_base 15: mod_base = OTHER; note = 2'-O-methyladenosine-3'-phosphate
  modified_base 16: mod_base = OTHER; note = 2'-O-methyluridine-3'-phosphate
  modified_base 17: mod_base = OTHER; note = 2'-O-methyluridine-3'-phosphate
  modified_base 18: mod_base = OTHER; note = 2'-O-methyluridine-3'-phosphate
  modified_base 19: mod_base = OTHER; note = 2'-O-methylguanosine-3'-phosphate
  modified_base 20: mod_base = OTHER; note = 2'-O-methyluridine-3'-phosphate
  modified_base 21: mod_base = OTHER; note = 2'-O-methylcytidine-3'-phosphorothioate
  modified_base 22: mod_base = OTHER; note = 2'-O-methyluridine-3'-phosphorothioate
  modified_base 23: mod_base = OTHER; note = 2'-O-methylguanosine
  misc_feature 1: note = RNA
  misc_feature 3..4: note = RNA
  misc_feature 6: note = RNA
  misc_feature 8..11: note = RNA
  misc_feature 13..23: note = RNA
  misc_feature 2: note = DNA
  misc_feature 5: note = DNA
  misc_feature 7: note = DNA
  misc_feature 12: note = DNA
atagatgtagtagaatttgtctg

SEQ ID NO: 516 - DNA, 23 bp, synthetic construct
  source 1..23: mol_type = other DNA
  modified_base 1: mod_base = OTHER; note = 2'-O-methyladenosine-3'-phosphorothioate
  modified_base 2: mod_base = OTHER; note = 2'-deoxythymidine-3'-phosphorothioate
  modified_base 3: mod_base = OTHER; note = 2'-O-methyladenosine-3'-phosphate
  modified_base 4: mod_base = OTHER; note = 2'-O-methylguanosine-3'-phosphate
  modified_base 6: mod_base = OTHER; note = 2'-O-methyluridine-3'-phosphate
  modified_base 8: mod_base = OTHER; note = 2'-O-methyluridine-3'-phosphate
  modified_base 9: mod_base = OTHER; note = 2'-O-methyladenosine-3'-phosphate
  modified_base 10: mod_base = OTHER; note = 2'-O-methylguanosine-3'-phosphate
  modified_base 11: mod_base = OTHER; note = 2'-O-methyluridine-3'-phosphate
  modified_base 13: mod_base = OTHER; note = 2'-O-methylguanosine-3'-phosphate
  modified_base 14: mod_base = OTHER; note = 2'-deoxy-2'-fluoroadenosine-3'-phosphate
  modified_base 15: mod_base = OTHER; note = 2'-O-methyladenosine-3'-phosphate
  modified_base 16: mod_base = OTHER; note = 2'-O-methyluridine-3'-phosphate
  modified_base 17: mod_base = OTHER; note = 2'-O-methyluridine-3'-phosphate
  modified_base 18: mod_base = OTHER; note = 2'-O-methyluridine-3'-phosphate
  modified_base 19: mod_base = OTHER; note = 2'-O-methylcytidine-3'-phosphate
  modified_base 20: mod_base = OTHER; note = 2'-O-methyluridine-3'-phosphate
  modified_base 21: mod_base = OTHER; note = 2'-O-methylcytidine-3'-phosphorothioate
  modified_base 22: mod_base = OTHER; note = 2'-O-methyluridine-3'-phosphorothioate
  modified_base 23: mod_base = OTHER; note = 2'-O-methylguanosine
  misc_feature 1: note = RNA
  misc_feature 3..4: note = RNA
  misc_feature 6: note = RNA
  misc_feature 8..11: note = RNA
  misc_feature 13..23: note = RNA
  misc_feature 2: note = DNA
  misc_feature 5: note = DNA
  misc_feature 7: note = DNA
  misc_feature 12: note = DNA
atagatatagtagaatttctctg

SEQ ID NO: 517 - DNA, 23 bp, synthetic construct
  source 1..23: mol_type = other DNA
  modified_base 1: mod_base = OTHER; note = 2'-O-methyladenosine-3'-phosphorothioate
  modified_base 2: mod_base = OTHER; note = 2'-deoxythymidine-3'-phosphorothioate
  modified_base 3: mod_base = OTHER; note = 2'-O-methyladenosine-3'-phosphate
  modified_base 4: mod_base = OTHER; note = 2'-O-methylguanosine-3'-phosphate
  modified_base 6: mod_base = OTHER; note = 2'-O-methyluridine-3'-phosphate
  modified_base 7: mod_base = OTHER; note = guanosine-2'-phosphate
  modified_base 8: mod_base = OTHER; note = 2'-O-methyluridine-3'-phosphate
  modified_base 9: mod_base = OTHER; note = 2'-O-methyladenosine-3'-phosphate
  modified_base 10: mod_base = OTHER; note = 2'-O-methylguanosine-3'-phosphate
  modified_base 11: mod_base = OTHER; note = 2'-O-methyluridine-3'-phosphate
  modified_base 13: mod_base = OTHER; note = 2'-O-methylguanosine-3'-phosphate
  modified_base 14: mod_base = OTHER; note = 2'-deoxy-2'-fluoroadenosine-3'-phosphate
  modified_base 15: mod_base = OTHER; note = 2'-O-methyladenosine-3'-phosphate
  modified_base 16: mod_base = OTHER; note = 2'-deoxy-2'-fluorouridine-3'-phosphate
  modified_base 17: mod_base = OTHER; note = 2'-O-methyluridine-3'-phosphate
  modified_base 18: mod_base = OTHER; note = 2'-O-methyluridine-3'-phosphate
  modified_base 19: mod_base = OTHER; note = 2'-O-methylcytidine-3'-phosphate
  modified_base 20: mod_base = OTHER; note = 2'-O-methyluridine-3'-phosphate
  modified_base 21: mod_base = OTHER; note = 2'-O-methylcytidine-3'-phosphorothioate
  modified_base 22: mod_base = OTHER; note = 2'-O-methyluridine-3'-phosphorothioate
  modified_base 23: mod_base = OTHER; note = 2'-O-methylguanosine
  misc_feature 1: note = RNA
  misc_feature 3..4: note = RNA
  misc_feature 6..11: note = RNA
  misc_feature 13..23: note = RNA
  misc_feature 2: note = DNA
  misc_feature 5: note = DNA
  misc_feature 12: note = DNA
atagatgtagtagaatttctctg

SEQ ID NO: 518 - DNA, 23 bp, synthetic construct
  source 1..23: mol_type = other DNA
  modified_base 1: mod_base = OTHER; note = 2'-O-methyladenosine-3'-phosphorothioate
  modified_base 2: mod_base = OTHER; note = 2'-deoxyadenosine-3'-phosphorothioate
  modified_base 3: mod_base = OTHER; note = 2'-O-methyluridine-3'-phosphate
  modified_base 4: mod_base = OTHER; note = 2'-O-methyladenosine-3'-phosphate
  modified_base 6: mod_base = OTHER; note = 2'-O-methyladenosine-3'-phosphate
  modified_base 8: mod_base = OTHER; note = 2'-O-methylguanosine-3'-phosphate
  modified_base 9: mod_base = OTHER; note = 2'-O-methyluridine-3'-phosphate
  modified_base 10: mod_base = OTHER; note = 2'-O-methyladenosine-3'-phosphate
  modified_base 11: mod_base = OTHER; note = 2'-O-methylguanosine-3'-phosphate
  modified_base 13: mod_base = OTHER; note = 2'-O-methyladenosine-3'-phosphate
  modified_base 14: mod_base = OTHER; note = 2'-deoxy-2'-fluoroguanosine-3'-phosphate
  modified_base 15: mod_base = OTHER; note = 2'-O-methyladenosine-3'-phosphate
  modified_base 16: mod_base = OTHER; note = 2'-O-methyladenosine-3'-phosphate
  modified_base 17: mod_base = OTHER; note = 2'-O-methyluridine-3'-phosphate
  modified_base 18: mod_base = OTHER; note = 2'-O-methyluridine-3'-phosphate
  modified_base 19: mod_base = OTHER; note = 2'-O-methyluridine-3'-phosphate
  modified_base 20: mod_base = OTHER; note = 2'-O-methylcytidine-3'-phosphate
  modified_base 21: mod_base = OTHER; note = 2'-O-methyluridine-3'-phosphorothioate
  modified_base 22: mod_base = OTHER; note = 2'-O-methylcytidine-3'-phosphorothioate
  modified_base 23: mod_base = OTHER; note = 2'-O-methyluridine
  misc_feature 1: note = RNA
  misc_feature 3..4: note = RNA
  misc_feature 6: note = RNA
  misc_feature 8..11: note = RNA
  misc_feature 13..23: note = RNA
  misc_feature 2: note = DNA
  misc_feature 5: note = DNA
  misc_feature 7: note = DNA
  misc_feature 12: note = DNA
aatagatgtagtagaatttctct

SEQ ID NO: 519 - DNA, 23 bp, synthetic construct
  source 1..23: mol_type = other DNA
  modified_base 1: mod_base = OTHER; note = 2'-O-methyladenosine-3'-phosphorothioate
  modified_base 2: mod_base = OTHER; note = 2'-deoxyadenosine-3'-phosphorothioate
  modified_base 3: mod_base = OTHER; note = 2'-O-methyluridine-3'-phosphate
  modified_base 4: mod_base = OTHER; note = 2'-O-methyladenosine-3'-phosphate
  modified_base 6: mod_base = OTHER; note = 2'-O-methyladenosine-3'-phosphate
  modified_base 8: mod_base = OTHER; note = 2'-O-methylguanosine-3'-phosphate
  modified_base 9: mod_base = OTHER; note = 2'-O-methyluridine-3'-phosphate
  modified_base 10: mod_base = OTHER; note = 2'-O-methyladenosine-3'-phosphate
  modified_base 11: mod_base = OTHER; note = 2'-O-methylguanosine-3'-phosphate
  modified_base 13: mod_base = OTHER; note = 2'-O-methyladenosine-3'-phosphate
  modified_base 15: mod_base = OTHER; note = 2'-O-methyladenosine-3'-phosphate
  modified_base 17: mod_base = OTHER; note = 2'-O-methyluridine-3'-phosphate
  modified_base 18: mod_base = OTHER; note = 2'-O-methyluridine-3'-phosphate
  modified_base 19: mod_base = OTHER; note = 2'-O-methyluridine-3'-phosphate
  modified_base 20: mod_base = OTHER; note = 2'-O-methylcytidine-3'-phosphate
  modified_base 21: mod_base = OTHER; note = 2'-O-methyluridine-3'-phosphorothioate
  modified_base 22: mod_base = OTHER; note = 2'-O-methylcytidine-3'-phosphorothioate
  modified_base 23: mod_base = OTHER; note = 2'-O-methyluridine
  misc_feature 1: note = RNA
  misc_feature 3..4: note = RNA
  misc_feature 6: note = RNA
  misc_feature 8..11: note = RNA
  misc_feature 13: note = RNA
  misc_feature 15: note = RNA
  misc_feature 17..23: note = RNA
  misc_feature 2: note = DNA
  misc_feature 5: note = DNA
  misc_feature 7: note = DNA
  misc_feature 12: note = DNA
  misc_feature 14: note = DNA
  misc_feature 16: note = DNA
aatagatgtagtagaatttctct

SEQ ID NO: 520 - DNA, 23 bp, synthetic construct
  source 1..23: mol_type = other DNA
  modified_base 1: mod_base = OTHER; note = 2'-O-methyluridine-3'-phosphorothioate
  modified_base 2: mod_base = OTHER; note = 2'-deoxyadenosine-3'-phosphorothioate
  modified_base 3: mod_base = OTHER; note = 2'-O-methyluridine-3'-phosphate
  modified_base 4: mod_base = OTHER; note = 2'-O-methyladenosine-3'-phosphate
  modified_base 6: mod_base = OTHER; note = 2'-O-methyladenosine-3'-phosphate
  modified_base 8: mod_base = OTHER; note = 2'-O-methylguanosine-3'-phosphate
  modified_base 9: mod_base = OTHER; note = 2'-O-methyluridine-3'-phosphate
  modified_base 10: mod_base = OTHER; note = 2'-O-methyladenosine-3'-phosphate
  modified_base 11: mod_base = OTHER; note = 2'-O-methylguanosine-3'-phosphate
  modified_base 13: mod_base = OTHER; note = 2'-O-methyladenosine-3'-phosphate
  modified_base 14: mod_base = OTHER; note = 2'-deoxy-2'-fluoroguanosine-3'-phosphate
  modified_base 15: mod_base = OTHER; note = 2'-O-methyladenosine-3'-phosphate
  modified_base 16: mod_base = OTHER; note = 2'-O-methyladenosine-3'-phosphate
  modified_base 17: mod_base = OTHER; note = 2'-O-methyluridine-3'-phosphate
  modified_base 18: mod_base = OTHER; note = 2'-O-methyluridine-3'-phosphate
  modified_base 19: mod_base = OTHER; note = 2'-O-methyluridine-3'-phosphate
  modified_base 20: mod_base = OTHER; note = 2'-O-methylcytidine-3'-phosphate
  modified_base 21: mod_base = OTHER; note = 2'-O-methyluridine-3'-phosphorothioate
  modified_base 22: mod_base = OTHER; note = 2'-O-methylcytidine-3'-phosphorothioate
  modified_base 23: mod_base = OTHER; note = 2'-O-methyluridine
  misc_feature 1: note = RNA
  misc_feature 3..4: note = RNA
  misc_feature 6: note = RNA
  misc_feature 8..11: note = RNA
  misc_feature 13..23: note = RNA
  misc_feature 2: note = DNA
  misc_feature 5: note = DNA
  misc_feature 7: note = DNA
  misc_feature 12: note = DNA
tatagatgtagtagaatttctct

SEQ ID NO: 521 - DNA, 23 bp, synthetic construct
  source 1..23: mol_type = other DNA
  modified_base 1: mod_base = OTHER; note = 2'-O-methyluridine-3'-phosphorothioate
  modified_base 2: mod_base = OTHER; note = 2'-deoxyadenosine-3'-phosphorothioate
  modified_base 3: mod_base = OTHER; note = 2'-O-methyluridine-3'-phosphate
  modified_base 4: mod_base = OTHER; note = 2'-O-methyladenosine-3'-phosphate
  modified_base 6: mod_base = OTHER; note = 2'-O-methyladenosine-3'-phosphate
  modified_base 8: mod_base = OTHER; note = 2'-O-methylguanosine-3'-phosphate
  modified_base 9: mod_base = OTHER; note = 2'-O-methyluridine-3'-phosphate
  modified_base 10: mod_base = OTHER; note = 2'-O-methyladenosine-3'-phosphate
  modified_base 11: mod_base = OTHER; note = 2'-O-methylguanosine-3'-phosphate
  modified_base 13: mod_base = OTHER; note = 2'-O-methyladenosine-3'-phosphate
  modified_base 15: mod_base = OTHER; note = 2'-O-methyladenosine-3'-phosphate
  modified_base 17: mod_base = OTHER; note = 2'-O-methyluridine-3'-phosphate
  modified_base 18: mod_base = OTHER; note = 2'-O-methyluridine-3'-phosphate
  modified_base 19: mod_base = OTHER; note = 2'-O-methyluridine-3'-phosphate
  modified_base 20: mod_base = OTHER; note = 2'-O-methylcytidine-3'-phosphate
  modified_base 21: mod_base = OTHER; note = 2'-O-methyluridine-3'-phosphorothioate
  modified_base 22: mod_base = OTHER; note = 2'-O-methylcytidine-3'-phosphorothioate
  modified_base 23: mod_base = OTHER; note = 2'-O-methyluridine
  misc_feature 1: note = RNA
  misc_feature 3..4: note = RNA
  misc_feature 6: note = RNA
  misc_feature 8..11: note = RNA
  misc_feature 13: note = RNA
  misc_feature 15: note = RNA
  misc_feature 17..23: note = RNA
  misc_feature 2: note = DNA
  misc_feature 5: note = DNA
  misc_feature 7: note = DNA
  misc_feature 12: note = DNA
  misc_feature 14: note = DNA
  misc_feature 16: note = DNA
tatagatgtagtagaatttctct

SEQ ID NO: 522 - DNA, 23 bp, synthetic construct
  source 1..23: mol_type = other DNA
  modified_base 1: mod_base = OTHER; note = 2'-O-methyladenosine-3'-phosphorothioate
  modified_base 2: mod_base = OTHER; note = 2'-deoxyadenosine-3'-phosphorothioate
  modified_base 3: mod_base = OTHER; note = 2'-O-methyluridine-3'-phosphate
  modified_base 4: mod_base = OTHER; note = 2'-O-methyladenosine-3'-phosphate
  modified_base 6: mod_base = OTHER; note = 2'-O-methyladenosine-3'-phosphate
  modified_base 8: mod_base = OTHER; note = 2'-O-methylguanosine-3'-phosphate
  modified_base 9: mod_base = OTHER; note = 2'-O-methyluridine-3'-phosphate
  modified_base 10: mod_base = OTHER; note = 2'-O-methyladenosine-3'-phosphate
  modified_base 11: mod_base = OTHER; note = 2'-O-methylguanosine-3'-phosphate
  modified_base 13: mod_base = OTHER; note = 2'-O-methyladenosine-3'-phosphate
  modified_base 14: mod_base = OTHER; note = 2'-deoxy-2'-fluoroguanosine-3'-phosphate
  modified_base 15: mod_base = OTHER; note = 2'-O-methyladenosine-3'-phosphate
  modified_base 16: mod_base = OTHER; note = 2'-O-methyladenosine-3'-phosphate
  modified_base 17: mod_base = OTHER; note = 2'-O-methyluridine-3'-phosphate
  modified_base 18: mod_base = OTHER; note = 2'-O-methyluridine-3'-phosphate
  modified_base 19: mod_base = OTHER; note = 2'-O-methyluridine-3'-phosphate
  modified_base 20: mod_base = OTHER; note = 2'-O-methylcytidine-3'-phosphate
  modified_base 21: mod_base = OTHER; note = 2'-O-methyluridine-3'-phosphorothioate
  modified_base 22: mod_base = OTHER; note = 2'-O-methylguanosine-3'-phosphorothioate
  modified_base 23: mod_base = OTHER; note = 2'-O-methylcytidine
  misc_feature 1: note = RNA
  misc_feature 3..4: note = RNA
  misc_feature 6: note = RNA
  misc_feature 8..11: note = RNA
  misc_feature 13..23: note = RNA
  misc_feature 2: note = DNA
  misc_feature 5: note = DNA
  misc_feature 7: note = DNA
  misc_feature 12: note = DNA
aatagatgtagtagaatttctgc

SEQ ID NO: 523 - DNA, 23 bp, synthetic construct
  source 1..23: mol_type = other DNA
  modified_base 1: mod_base = OTHER; note = 2'-O-methyladenosine-3'-phosphorothioate
  modified_base 2: mod_base = OTHER; note = 2'-deoxyadenosine-3'-phosphorothioate
  modified_base 3: mod_base = OTHER; note = 2'-O-methyluridine-3'-phosphate
  modified_base 4: mod_base = OTHER; note = 2'-O-methyladenosine-3'-phosphate
  modified_base 6: mod_base = OTHER; note = 2'-O-methyladenosine-3'-phosphate
  modified_base 8: mod_base = OTHER; note = 2'-O-methylguanosine-3'-phosphate
  modified_base 9: mod_base = OTHER; note = 2'-O-methyluridine-3'-phosphate
  modified_base 10: mod_base = OTHER; note = 2'-O-methyladenosine-3'-phosphate
  modified_base 11: mod_base = OTHER; note = 2'-O-methylguanosine-3'-phosphate
  modified_base 13: mod_base = OTHER; note = 2'-O-methyladenosine-3'-phosphate
  modified_base 15: mod_base = OTHER; note = 2'-O-methyladenosine-3'-phosphate
  modified_base 17: mod_base = OTHER; note = 2'-O-methyluridine-3'-phosphate
  modified_base 18: mod_base = OTHER; note = 2'-O-methyluridine-3'-phosphate
  modified_base 19: mod_base = OTHER; note = 2'-O-methyluridine-3'-phosphate
  modified_base 20: mod_base = OTHER; note = 2'-O-methylcytidine-3'-phosphate
  modified_base 21: mod_base = OTHER; note = 2'-O-methyluridine-3'-phosphorothioate
  modified_base 22: mod_base = OTHER; note = 2'-O-methylguanosine-3'-phosphorothioate
  modified_base 23: mod_base = OTHER; note = 2'-O-methylcytidine
  misc_feature 1: note = RNA
  misc_feature 3..4: note = RNA
  misc_feature 6: note = RNA
  misc_feature 8..11: note = RNA
  misc_feature 13: note = RNA
  misc_feature 15: note = RNA
  misc_feature 17..23: note = RNA
  misc_feature 2: note = DNA
  misc_feature 5: note = DNA
  misc_feature 7: note = DNA
  misc_feature 12: note = DNA
  misc_feature 14: note = DNA
  misc_feature 16: note = DNA
aatagatgtagtagaatttctgc

SEQ ID NO: 524 - DNA, 21 bp, synthetic construct
  source 1..21: mol_type = other DNA
  modified_base 1: mod_base = OTHER; note = 2'-O-methyladenosine-3'-phosphorothioate
  modified_base 2: mod_base = OTHER; note = 2'-deoxyadenosine-3'-phosphorothioate
  modified_base 3: mod_base = OTHER; note = 2'-O-methyluridine-3'-phosphate
  modified_base 4: mod_base = OTHER; note = 2'-O-methyladenosine-3'-phosphate
  modified_base 6: mod_base = OTHER; note = 2'-O-methyladenosine-3'-phosphate
  modified_base 8: mod_base = OTHER; note = 2'-O-methylguanosine-3'-phosphate
  modified_base 9: mod_base = OTHER; note = 2'-O-methyluridine-3'-phosphate
  modified_base 10: mod_base = OTHER; note = 2'-O-methyladenosine-3'-phosphate
  modified_base 11: mod_base = OTHER; note = 2'-O-methylguanosine-3'-phosphate
  modified_base 13: mod_base = OTHER; note = 2'-O-methyladenosine-3'-phosphate
  modified_base 14: mod_base = OTHER; note = 2'-deoxy-2'-fluoroguanosine-3'-phosphate
  modified_base 15: mod_base = OTHER; note = 2'-O-methyladenosine-3'-phosphate
  modified_base 16: mod_base = OTHER; note = 2'-O-methyladenosine-3'-phosphate
  modified_base 17: mod_base = OTHER; note = 2'-O-methyluridine-3'-phosphate
  modified_base 18: mod_base = OTHER; note = 2'-O-methyluridine-3'-phosphate
  modified_base 19: mod_base = OTHER; note = 2'-O-methyluridine-3'-phosphorothioate
  modified_base 20: mod_base = OTHER; note = 2'-O-methylcytidine-3'-phosphorothioate
  modified_base 21: mod_base = OTHER; note = 2'-O-methyluridine
  misc_feature 1: note = RNA
  misc_feature 3..4: note = RNA
  misc_feature 6: note = RNA
  misc_feature 8..11: note = RNA
  misc_feature 13..21: note = RNA
  misc_feature 2: note = DNA
  misc_feature 5: note = DNA
  misc_feature 7: note = DNA
  misc_feature 12: note = DNA
aatagatgtagtagaatttct

SEQ ID NO: 525 - DNA, 21 bp, synthetic construct
  source 1..21: mol_type = other DNA
  modified_base 1: mod_base = OTHER; note = 2'-O-methyladenosine-3'-phosphorothioate
  modified_base 2: mod_base = OTHER; note = 2'-deoxyadenosine-3'-phosphorothioate
  modified_base 3: mod_base = OTHER; note = 2'-O-methyluridine-3'-phosphate
  modified_base 4: mod_base = OTHER; note = 2'-O-methyladenosine-3'-phosphate
  modified_base 6: mod_base = OTHER; note = 2'-O-methyladenosine-3'-phosphate
  modified_base 8: mod_base = OTHER; note = 2'-O-methylguanosine-3'-phosphate
  modified_base 9: mod_base = OTHER; note = 2'-O-methyluridine-3'-phosphate
  modified_base 10: mod_base = OTHER; note = 2'-O-methyladenosine-3'-phosphate
  modified_base 11: mod_base = OTHER; note = 2'-O-methylguanosine-3'-phosphate
  modified_base 13: mod_base = OTHER; note = 2'-O-methyladenosine-3'-phosphate
  modified_base 15: mod_base = OTHER; note = 2'-O-methyladenosine-3'-phosphate
  modified_base 17: mod_base = OTHER; note = 2'-O-methyluridine-3'-phosphate
  modified_base 18: mod_base = OTHER; note = 2'-O-methyluridine-3'-phosphate
  modified_base 19: mod_base = OTHER; note = 2'-O-methyluridine-3'-phosphorothioate
  modified_base 20: mod_base = OTHER; note = 2'-O-methylcytidine-3'-phosphorothioate
  modified_base 21: mod_base = OTHER; note = 2'-O-methyluridine
  misc_feature 1: note = RNA
  misc_feature 3..4: note = RNA
  misc_feature 6: note = RNA
  misc_feature 8..11: note = RNA
  misc_feature 13: note = RNA
  misc_feature 15: note = RNA
  misc_feature 17..21: note = RNA
  misc_feature 2: note = DNA
  misc_feature 5: note = DNA
  misc_feature 7: note = DNA
  misc_feature 12: note = DNA
  misc_feature 14: note = DNA
  misc_feature 16: note = DNA
aatagatgtagtagaatttct

SEQ ID NO: 526 - DNA, 23 bp, synthetic construct
  source 1..23: mol_type = other DNA
  modified_base 1: mod_base = OTHER; note = 2'-O-methyladenosine-3'-phosphorothioate
  modified_base 2: mod_base = OTHER; note = 2'-deoxyadenosine-3'-phosphorothioate
  modified_base 3: mod_base = OTHER; note = 2'-O-methyluridine-3'-phosphate
  modified_base 4: mod_base = OTHER; note = 2'-O-methyladenosine-3'-phosphate
  modified_base 6: mod_base = OTHER; note = 2'-O-methyladenosine-3'-phosphate
  modified_base 8: mod_base = OTHER; note = 2'-O-methylguanosine-3'-phosphate
  modified_base 9: mod_base = OTHER; note = 2'-O-methyluridine-3'-phosphate
  modified_base 10: mod_base = OTHER; note = 2'-O-methyladenosine-3'-phosphate
  modified_base 11: mod_base = OTHER; note = 2'-O-methylguanosine-3'-phosphate
  modified_base 13: mod_base = OTHER; note = 2'-O-methyladenosine-3'-phosphate
  modified_base 14: mod_base = OTHER; note = 2'-deoxy-2'-fluoroguanosine-3'-phosphate
  modified_base 15: mod_base = OTHER; note = 2'-O-methyladenosine-3'-phosphate
  modified_base 16: mod_base = OTHER; note = 2'-O-methyladenosine-3'-phosphate
  modified_base 17: mod_base = OTHER; note = 2'-O-methyladenosine-3'-phosphate
  modified_base 18: mod_base = OTHER; note = 2'-O-methyluridine-3'-phosphate
  modified_base 19: mod_base = OTHER; note = 2'-O-methyluridine-3'-phosphate
  modified_base 20: mod_base = OTHER; note = 2'-O-methylcytidine-3'-phosphate
  modified_base 21: mod_base = OTHER; note = 2'-O-methyluridine-3'-phosphorothioate
  modified_base 22: mod_base = OTHER; note = 2'-O-methylcytidine-3'-phosphorothioate
  modified_base 23: mod_base = OTHER; note = 2'-O-methyluridine
  misc_feature 1: note = RNA
  misc_feature 3..4: note = RNA
  misc_feature 6: note = RNA
  misc_feature 8..11: note = RNA
  misc_feature 13..23: note = RNA
  misc_feature 2: note = DNA
  misc_feature 5: note = DNA
  misc_feature 7: note = DNA
  misc_feature 12: note = DNA
aatagatgtagtagaaattctct

SEQ ID NO: 527 - DNA, 23 bp, synthetic construct
  source 1..23: mol_type = other DNA
  modified_base 1: mod_base = OTHER; note = 2'-O-methyladenosine-3'-phosphorothioate
  modified_base 2: mod_base = OTHER; note = 2'-deoxyadenosine-3'-phosphorothioate
  modified_base 3: mod_base = OTHER; note = 2'-O-methyluridine-3'-phosphate
  modified_base 4: mod_base = OTHER; note = 2'-O-methyladenosine-3'-phosphate
  modified_base 6: mod_base = OTHER; note = 2'-O-methyladenosine-3'-phosphate
  modified_base 8: mod_base = OTHER; note = 2'-O-methylguanosine-3'-phosphate
  modified_base 9: mod_base = OTHER; note = 2'-O-methyluridine-3'-phosphate
  modified_base 10: mod_base = OTHER; note = 2'-O-methyladenosine-3'-phosphate
  modified_base 11: mod_base = OTHER; note = 2'-O-methylguanosine-3'-phosphate
  modified_base 13: mod_base = OTHER; note = 2'-O-methyladenosine-3'-phosphate
  modified_base 14: mod_base = OTHER; note = 2'-deoxy-2'-fluoroguanosine-3'-phosphate
  modified_base 15: mod_base = OTHER; note = 2'-O-methyladenosine-3'-phosphate
  modified_base 16: mod_base = OTHER; note = 2'-O-methyladenosine-3'-phosphate
  modified_base 17: mod_base = OTHER; note = 2'-O-methyluridine-3'-phosphate
  modified_base 18: mod_base = OTHER; note = 2'-O-methyladenosine-3'-phosphate
  modified_base 19: mod_base = OTHER; note = 2'-O-methyluridine-3'-phosphate
  modified_base 20: mod_base = OTHER; note = 2'-O-methylcytidine-3'-phosphate
  modified_base 21: mod_base = OTHER; note = 2'-O-methyluridine-3'-phosphorothioate
  modified_base 22: mod_base = OTHER; note = 2'-O-methylcytidine-3'-phosphorothioate
  modified_base 23: mod_base = OTHER; note = 2'-O-methyluridine
  misc_feature 1: note = RNA
  misc_feature 3..4: note = RNA
  misc_feature 6: note = RNA
  misc_feature 8..11: note = RNA
  misc_feature 13..23: note = RNA
  misc_feature 2: note = DNA
  misc_feature 5: note = DNA
  misc_feature 7: note = DNA
  misc_feature 12: note = DNA
aatagatgtagtagaatatctct

SEQ ID NO: 528 - DNA, 23 bp, synthetic construct
  source 1..23: mol_type = other DNA
  modified_base 1: mod_base = OTHER; note = 2'-O-methyladenosine-3'-phosphorothioate
  modified_base 2: mod_base = OTHER; note = 2'-deoxyadenosine-3'-phosphorothioate
  modified_base 3: mod_base = OTHER; note = 2'-O-methyluridine-3'-phosphate
  modified_base 4: mod_base = OTHER; note = 2'-O-methyladenosine-3'-phosphate
  modified_base 6: mod_base = OTHER; note = 2'-O-methyladenosine-3'-phosphate
  modified_base 8: mod_base = OTHER; note = 2'-O-methylguanosine-3'-phosphate
  modified_base 9: mod_base = OTHER; note = 2'-O-methyluridine-3'-phosphate
  modified_base 10: mod_base = OTHER; note = 2'-O-methyladenosine-3'-phosphate
  modified_base 11: mod_base = OTHER; note = 2'-O-methylguanosine-3'-phosphate
  modified_base 13: mod_base = OTHER; note = 2'-O-methyladenosine-3'-phosphate
  modified_base 14: mod_base = OTHER; note = 2'-deoxy-2'-fluoroguanosine-3'-phosphate
  modified_base 15: mod_base = OTHER; note = 2'-O-methyladenosine-3'-phosphate
  modified_base 16: mod_base = OTHER; note = 2'-O-methyladenosine-3'-phosphate
  modified_base 17: mod_base = OTHER; note = 2'-O-methyluridine-3'-phosphate
  modified_base 18: mod_base = OTHER; note = 2'-O-methyluridine-3'-phosphate
  modified_base 19: mod_base = OTHER; note = 2'-O-methyladenosine-3'-phosphate
  modified_base 20: mod_base = OTHER; note = 2'-O-methylcytidine-3'-phosphate
  modified_base 21: mod_base = OTHER; note = 2'-O-methyluridine-3'-phosphorothioate
  modified_base 22: mod_base = OTHER; note = 2'-O-methylcytidine-3'-phosphorothioate
  modified_base 23: mod_base = OTHER; note = 2'-O-methyluridine
  misc_feature 1: note = RNA
  misc_feature 3..4: note = RNA
  misc_feature 6: note = RNA
  misc_feature 8..11: note = RNA
  misc_feature 13..23: note = RNA
  misc_feature 2: note = DNA
  misc_feature 5: note = DNA
  misc_feature 7: note = DNA
  misc_feature 12: note = DNA
aatagatgtagtagaattactct

SEQ ID NO: 529 - DNA, 23 bp, synthetic construct
  source 1..23: mol_type = other DNA
  modified_base 1: mod_base = OTHER; note = 2'-O-methyladenosine-3'-phosphorothioate
  modified_base 2: mod_base = OTHER; note = 2'-deoxyadenosine-3'-phosphorothioate
  modified_base 3: mod_base = OTHER; note = 2'-O-methyluridine-3'-phosphate
  modified_base 4: mod_base = OTHER; note = 2'-O-methyladenosine-3'-phosphate
  modified_base 6: mod_base = OTHER; note = 2'-O-methyladenosine-3'-phosphate
  modified_base 8: mod_base = OTHER; note = 2'-O-methylguanosine-3'-phosphate
  modified_base 9: mod_base = OTHER; note = 2'-O-methyluridine-3'-phosphate
  modified_base 10: mod_base = OTHER; note = 2'-O-methyladenosine-3'-phosphate
  modified_base 11: mod_base = OTHER; note = 2'-O-methylguanosine-3'-phosphate
  modified_base 13: mod_base = OTHER; note = 2'-O-methyladenosine-3'-phosphate
  modified_base 15: mod_base = OTHER; note = 2'-O-methyladenosine-3'-phosphate
  modified_base 17: mod_base = OTHER; note = 2'-O-methyladenosine-3'-phosphate
  modified_base 18: mod_base = OTHER; note = 2'-O-methyluridine-3'-phosphate
  modified_base 19: mod_base = OTHER; note = 2'-O-methyluridine-3'-phosphate
  modified_base 20: mod_base = OTHER; note = 2'-O-methylcytidine-3'-phosphate
  modified_base 21: mod_base = OTHER; note = 2'-O-methyluridine-3'-phosphorothioate
  modified_base 22: mod_base = OTHER; note = 2'-O-methylcytidine-3'-phosphorothioate
  modified_base 23: mod_base = OTHER; note = 2'-O-methyluridine
  misc_feature 1: note = RNA
  misc_feature 3..4: note = RNA
  misc_feature 6: note = RNA
  misc_feature 8..11: note = RNA
  misc_feature 13: note = RNA
  misc_feature 15: note = RNA
  misc_feature 17..23: note = RNA
  misc_feature 2: note = DNA
  misc_feature 5: note = DNA
  misc_feature 7: note = DNA
  misc_feature 12: note = DNA
  misc_feature 14: note = DNA
  misc_feature 16: note = DNA
aatagatgtagtagaaattctct

SEQ ID NO: 530 - DNA, 23 bp, synthetic construct
  source 1..23: mol_type = other DNA
  modified_base 1: mod_base = OTHER; note = 2'-O-methyladenosine-3'-phosphorothioate
  modified_base 2: mod_base = OTHER; note = 2'-deoxyadenosine-3'-phosphorothioate
  modified_base 3: mod_base = OTHER; note = 2'-O-methyluridine-3'-phosphate
  modified_base 4: mod_base = OTHER; note = 2'-O-methyladenosine-3'-phosphate
  modified_base 6: mod_base = OTHER; note = 2'-O-methyladenosine-3'-phosphate
  modified_base 8: mod_base = OTHER; note = 2'-O-methylguanosine-3'-phosphate
  modified_base 9: mod_base = OTHER; note = 2'-O-methyluridine-3'-phosphate
  modified_base 10: mod_base = OTHER; note = 2'-O-methyladenosine-3'-phosphate
  modified_base 11: mod_base = OTHER; note = 2'-O-methylguanosine-3'-phosphate
  modified_base 13: mod_base = OTHER; note = 2'-O-methyladenosine-3'-phosphate
  modified_base 15: mod_base = OTHER; note = 2'-O-methyladenosine-3'-phosphate
  modified_base 17: mod_base = OTHER; note = 2'-O-methyluridine-3'-phosphate
  modified_base 18: mod_base = OTHER; note = 2'-O-methyladenosine-3'-phosphate
  modified_base 19: mod_base = OTHER; note = 2'-O-methyluridine-3'-phosphate
  modified_base 20: mod_base = OTHER; note = 2'-O-methylcytidine-3'-phosphate
  modified_base 21: mod_base = OTHER; note = 2'-O-methyluridine-3'-phosphorothioate
  modified_base 22: mod_base = OTHER; note = 2'-O-methylcytidine-3'-phosphorothioate
  modified_base 23: mod_base = OTHER; note = 2'-O-methyluridine
  misc_feature 1: note = RNA
  misc_feature 3..4: note = RNA
  misc_feature 6: note = RNA
  misc_feature 8..11: note = RNA
  misc_feature 13: note = RNA
  misc_feature 15: note = RNA
  misc_feature 17..23: note = RNA
  misc_feature 2: note = DNA
  misc_feature 5: note = DNA
  misc_feature 7: note = DNA
  misc_feature 12: note = DNA
  misc_feature 14: note = DNA
  misc_feature 16: note = DNA
aatagatgtagtagaatatctct

SEQ ID NO: 531 - DNA, 23 bp, synthetic construct
  source 1..23: mol_type = other DNA
  modified_base 1: mod_base = OTHER; note = 2'-O-methyladenosine-3'-phosphorothioate
  modified_base 2: mod_base = OTHER; note = 2'-deoxyadenosine-3'-phosphorothioate
  modified_base 3: mod_base = OTHER; note = 2'-O-methyluridine-3'-phosphate
  modified_base 4: mod_base = OTHER; note = 2'-O-methyladenosine-3'-phosphate
  modified_base 6: mod_base = OTHER; note = 2'-O-methyladenosine-3'-phosphate
  modified_base 8: mod_base = OTHER; note = 2'-O-methylguanosine-3'-phosphate
  modified_base 9: mod_base = OTHER; note = 2'-O-methyluridine-3'-phosphate
  modified_base 10: mod_base = OTHER; note = 2'-O-methyladenosine-3'-phosphate
  modified_base 11: mod_base = OTHER; note = 2'-O-methylguanosine-3'-phosphate
  modified_base 13: mod_base = OTHER; note = 2'-O-methyladenosine-3'-phosphate
  modified_base 15: mod_base = OTHER; note = 2'-O-methyladenosine-3'-phosphate
  modified_base 17: mod_base = OTHER; note = 2'-O-methyluridine-3'-phosphate
  modified_base 18: mod_base = OTHER; note = 2'-O-methyluridine-3'-phosphate
  modified_base 19: mod_base = OTHER; note = 2'-O-methyladenosine-3'-phosphate
  modified_base 20: mod_base = OTHER; note = 2'-O-methylcytidine-3'-phosphate
  modified_base 21: mod_base = OTHER; note = 2'-O-methyluridine-3'-phosphorothioate
  modified_base 22: mod_base = OTHER; note = 2'-O-methylcytidine-3'-phosphorothioate
  modified_base 23: mod_base = OTHER; note = 2'-O-methyluridine
  misc_feature 1: note = RNA
  misc_feature 3..4: note = RNA
  misc_feature 6: note = RNA
  misc_feature 8..11: note = RNA
  misc_feature 13: note = RNA
  misc_feature 15: note = RNA
  misc_feature 17..23: note = RNA
  misc_feature 2: note = DNA
  misc_feature 5: note = DNA
  misc_feature 7: note = DNA
  misc_feature 12: note = DNA
  misc_feature 14: note = DNA
  misc_feature 16: note = DNA
aatagatgtagtagaattactct

SEQ ID NO: 532 - DNA, 21 bp, synthetic construct
  source 1..21: mol_type = other DNA
  modified_base 1: mod_base = OTHER; note = 2'-O-methyladenosine-3'-phosphorothioate
  modified_base 2: mod_base = OTHER; note = 2'-deoxyadenosine-3'-phosphorothioate
  modified_base 3: mod_base = OTHER; note = 2'-O-methyluridine-3'-phosphate
  modified_base 4: mod_base = OTHER; note = 2'-O-methyladenosine-3'-phosphate
  modified_base 6: mod_base = OTHER; note = 2'-O-methyladenosine-3'-phosphate
  modified_base 8: mod_base = OTHER; note = 2'-O-methylguanosine-3'-phosphate
  modified_base 9: mod_base = OTHER; note = 2'-O-methyluridine-3'-phosphate
  modified_base 10: mod_base = OTHER; note = 2'-O-methyladenosine-3'-phosphate
  modified_base 11: mod_base = OTHER; note = 2'-O-methylguanosine-3'-phosphate
  modified_base 13: mod_base = OTHER; note = 2'-O-methyladenosine-3'-phosphate
  modified_base 14: mod_base = OTHER; note = 2'-deoxy-2'-fluoroguanosine-3'-phosphate
  modified_base 15: mod_base = OTHER; note = 2'-O-methyladenosine-3'-phosphate
  modified_base 16: mod_base = OTHER; note = 2'-O-methyladenosine-3'-phosphate
  modified_base 17: mod_base = OTHER; note = 2'-O-methyladenosine-3'-phosphate
  modified_base 18: mod_base = OTHER; note = 2'-O-methyluridine-3'-phosphate
  modified_base 19: mod_base = OTHER; note = 2'-O-methyluridine-3'-phosphorothioate
  modified_base 20: mod_base = OTHER; note = 2'-O-methylcytidine-3'-phosphorothioate
  modified_base 21: mod_base = OTHER; note = 2'-O-methyluridine
  misc_feature 1: note = RNA
  misc_feature 3..4: note = RNA
  misc_feature 6: note = RNA
  misc_feature 8..11: note = RNA
  misc_feature 13..21: note = RNA
  misc_feature 2: note = DNA
  misc_feature 5: note = DNA
  misc_feature 7: note = DNA
  misc_feature 12: note = DNA
aatagatgtagtagaaattct

SEQ ID NO: 533 - DNA, 21 bp, synthetic construct
  source 1..21: mol_type = other DNA
  modified_base 1: mod_base = OTHER; note = 2'-O-methyladenosine-3'-phosphorothioate
  modified_base 2: mod_base = OTHER; note = 2'-deoxyadenosine-3'-phosphorothioate
  modified_base 3: mod_base = OTHER; note = 2'-O-methyluridine-3'-phosphate
  modified_base 4: mod_base = OTHER; note = 2'-O-methyladenosine-3'-phosphate
  modified_base 6: mod_base = OTHER; note = 2'-O-methyladenosine-3'-phosphate
  modified_base 8: mod_base = OTHER; note = 2'-O-methylguanosine-3'-phosphate
  modified_base 9: mod_base = OTHER; note = 2'-O-methyluridine-3'-phosphate
  modified_base 10: mod_base = OTHER; note = 2'-O-methyladenosine-3'-phosphate
  modified_base 11: mod_base = OTHER; note = 2'-O-methylguanosine-3'-phosphate
  modified_base 13: mod_base = OTHER; note = 2'-O-methyladenosine-3'-phosphate
  modified_base 14: mod_base = OTHER; note = 2'-deoxy-2'-fluoroguanosine-3'-phosphate
  modified_base 15: mod_base = OTHER; note = 2'-O-methyladenosine-3'-phosphate
  modified_base 16: mod_base = OTHER; note = 2'-O-methyladenosine-3'-phosphate
  modified_base 17: mod_base = OTHER; note = 2'-O-methyluridine-3'-phosphate
  modified_base 18: mod_base = OTHER; note = 2'-O-methyladenosine-3'-phosphate
  modified_base 19: mod_base = OTHER; note = 2'-O-methyluridine-3'-phosphorothioate
  modified_base 20: mod_base = OTHER; note = 2'-O-methylcytidine-3'-phosphorothioate
  modified_base 21: mod_base = OTHER; note = 2'-O-methyluridine
  misc_feature 1: note = RNA
  misc_feature 3..4: note = RNA
  misc_feature 6: note = RNA
  misc_feature 8..11: note = RNA
  misc_feature 13..21: note = RNA
  misc_feature 2: note = DNA
  misc_feature 5: note = DNA
  misc_feature 7: note = DNA
  misc_feature 12: note = DNA
aatagatgtagtagaatatct

SEQ ID NO: 534 - DNA, 21 bp, synthetic construct
  source 1..21: mol_type = other DNA
  modified_base 1: mod_base = OTHER; note = 2'-O-methyladenosine-3'-phosphorothioate
  modified_base 2: mod_base = OTHER; note = 2'-deoxyadenosine-3'-phosphorothioate
  modified_base 3: mod_base = OTHER; note = 2'-O-methyluridine-3'-phosphate
  modified_base 4: mod_base = OTHER; note = 2'-O-methyladenosine-3'-phosphate
  modified_base 6: mod_base = OTHER; note = 2'-O-methyladenosine-3'-phosphate
  modified_base 8: mod_base = OTHER; note = 2'-O-methylguanosine-3'-phosphate
  modified_base 9: mod_base = OTHER; note = 2'-O-methyluridine-3'-phosphate
  modified_base 10: mod_base = OTHER; note = 2'-O-methyladenosine-3'-phosphate
  modified_base 11: mod_base = OTHER; note = 2'-O-methylguanosine-3'-phosphate
  modified_base 13: mod_base = OTHER; note = 2'-O-methyladenosine-3'-phosphate
  modified_base 14: mod_base = OTHER; note = 2'-deoxy-2'-fluoroguanosine-3'-phosphate
  modified_base 15: mod_base = OTHER; note = 2'-O-methyladenosine-3'-phosphate
  modified_base 16: mod_base = OTHER; note = 2'-O-methyladenosine-3'-phosphate
  modified_base 17: mod_base = OTHER; note = 2'-O-methyluridine-3'-phosphate
  modified_base 18: mod_base = OTHER; note = 2'-O-methyluridine-3'-phosphate
  modified_base 19: mod_base = OTHER; note = 2'-O-methyladenosine-3'-phosphorothioate
  modified_base 20: mod_base = OTHER; note = 2'-O-methylcytidine-3'-phosphorothioate
  modified_base 21: mod_base = OTHER; note = 2'-O-methyluridine
  misc_feature 1: note = RNA
  misc_feature 3..4: note = RNA
  misc_feature 6: note = RNA
  misc_feature 8..11: note = RNA
  misc_feature 13..21: note = RNA
  misc_feature 2: note = DNA
  misc_feature 5: note = DNA
  misc_feature 7: note = DNA
  misc_feature 12: note = DNA
aatagatgtagtagaattact

SEQ ID NO: 535 - DNA, 23 bp, synthetic construct
  source 1..23: mol_type = other DNA
  modified_base 1: mod_base = OTHER; note = 2'-O-methyladenosine-3'-phosphorothioate
  modified_base 2: mod_base = OTHER; note = 2'-deoxyadenosine-3'-phosphorothioate
  modified_base 3: mod_base = OTHER; note = 2'-O-methyluridine-3'-phosphate
  modified_base 4: mod_base = OTHER; note = 2'-O-methyladenosine-3'-phosphate
  modified_base 6: mod_base = OTHER; note = 2'-O-methyladenosine-3'-phosphate
  modified_base 7: mod_base = OTHER; note = uridine-2'-phosphate
  modified_base 8: mod_base = OTHER; note = 2'-O-methylguanosine-3'-phosphate
  modified_base 9: mod_base = OTHER; note = 2'-O-methyluridine-3'-phosphate
  modified_base 10: mod_base = OTHER; note = 2'-O-methyladenosine-3'-phosphate
  modified_base 11: mod_base = OTHER; note = 2'-O-methylguanosine-3'-phosphate
  modified_base 13: mod_base = OTHER; note = 2'-O-methyladenosine-3'-phosphate
  modified_base 14: mod_base = OTHER; note = 2'-deoxy-2'-fluoroguanosine-3'-phosphate
  modified_base 15: mod_base = OTHER; note = 2'-O-methyladenosine-3'-phosphate
  modified_base 16: mod_base = OTHER; note = 2'-deoxy-2'-fluoroadenosine-3'-phosphate
  modified_base 17: mod_base = OTHER; note = 2'-O-methyluridine-3'-phosphate
  modified_base 18: mod_base = OTHER; note = 2'-O-methyluridine-3'-phosphate
  modified_base 19: mod_base = OTHER; note = 2'-O-methyluridine-3'-phosphate
  modified_base 20: mod_base = OTHER; note = 2'-O-methylcytidine-3'-phosphate
  modified_base 21: mod_base = OTHER; note = 2'-O-methyluridine-3'-phosphorothioate
  modified_base 22: mod_base = OTHER; note = 2'-O-methylcytidine-3'-phosphorothioate
  modified_base 23: mod_base = OTHER; note = 2'-O-methyluridine
  misc_feature 1: note = RNA
  misc_feature 3..4: note = RNA
  misc_feature 6..11: note = RNA
  misc_feature 13..23: note = RNA
  misc_feature 2: note = DNA
  misc_feature 5: note = DNA
  misc_feature 12: note = DNA
aatagatgtagtagaatttctct

SEQ ID NO: 536 - RNA, 23 nt, synthetic construct
  source 1..23: mol_type = other RNA
  modified_base 1: mod_base = OTHER; note = 2'-O-methyladenosine-3'-phosphorothioate
  modified_base 2: mod_base = OTHER; note = 2'-deoxy-2'-fluorouridine-3'-phosphorothioate
  modified_base 3: mod_base = OTHER; note = 2'-O-methyladenosine-3'-phosphate
  modified_base 4: mod_base = OTHER; note = 2'-O-methylguanosine-3'-phosphate
  modified_base 5: mod_base = OTHER; note = 2'-O-methyladenosine-3'-phosphate
  modified_base 6: mod_base = OTHER; note = 2'-deoxy-2'-fluorouridine-3'-phosphate
  modified_base 7: mod_base = OTHER; note = 2'-O-methylguanosine-3'-phosphate
  modified_base 8: mod_base = OTHER; note = 2'-deoxy-2'-fluorouridine-3'-phosphate
  modified_base 9: mod_base = OTHER; note = 2'-deoxy-2'-fluoroadenosine-3'-phosphate
  modified_base 10: mod_base = OTHER; note = 2'-O-methylguanosine-3'-phosphate
  modified_base 11: mod_base = OTHER; note = 2'-O-methyluridine-3'-phosphate
  modified_base 12: mod_base = OTHER; note = 2'-O-methyladenosine-3'-phosphate
  modified_base 13: mod_base = OTHER; note = 2'-O-methylguanosine-3'-phosphate
  modified_base 14: mod_base = OTHER; note = 2'-deoxy-2'-fluoroadenosine-3'-phosphate
  modified_base 15: mod_base = OTHER; note = 2'-O-methyladenosine-3'-phosphate
  modified_base 16: mod_base = OTHER; note = 2'-deoxy-2'-fluorouridine-3'-phosphate
  modified_base 17: mod_base = OTHER; note = 2'-O-methyluridine-3'-phosphate
  modified_base 18: mod_base = OTHER; note = 2'-O-methyluridine-3'-phosphate
  modified_base 19: mod_base = OTHER; note = 2'-O-methylcytidine-3'-phosphate
  modified_base 20: mod_base = OTHER; note = 2'-O-methyluridine-3'-phosphate
  modified_base 21: mod_base = OTHER; note = 2'-O-methylcytidine-3'-phosphorothioate
  modified_base 22: mod_base = OTHER; note = 2'-O-methyluridine-3'-phosphorothioate
  modified_base 23: mod_base = OTHER; note = 2'-O-methylguanosine
atagatgtagtagaatttctctg

SEQ ID NO: 537 - RNA, 23 nt, synthetic construct
  source 1..23: mol_type = other RNA
  modified_base 1: mod_base = OTHER; note = 2'-O-methyladenosine-3'-phosphorothioate
  modified_base 2: mod_base = OTHER; note = 2'-deoxy-2'-fluoroadenosine-3'-phosphorothioate
  modified_base 3: mod_base = OTHER; note = 2'-O-methyluridine-3'-phosphate
  modified_base 4: mod_base = OTHER; note = 2'-O-methyladenosine-3'-phosphate
  modified_base 5: mod_base = OTHER; note = 2'-O-methylguanosine-3'-phosphate
  modified_base 6: mod_base = OTHER; note = 2'-deoxy-2'-fluoroadenosine-3'-phosphate
  modified_base 7: mod_base = OTHER; note = 2'-O-methyluridine-3'-phosphate
  modified_base 8: mod_base = OTHER; note = 2'-deoxy-2'-fluoroguanosine-3'-phosphate
  modified_base 9: mod_base = OTHER; note = 2'-deoxy-2'-fluorouridine-3'-phosphate
  modified_base 10: mod_base = OTHER; note = 2'-O-methyladenosine-3'-phosphate
  modified_base 11: mod_base = OTHER; note = 2'-O-methylguanosine-3'-phosphate
  modified_base 12: mod_base = OTHER; note = 2'-O-methyluridine-3'-phosphate
  modified_base 13: mod_base = OTHER; note = 2'-O-methyladenosine-3'-phosphate
  modified_base 14: mod_base = OTHER; note = 2'-deoxy-2'-fluoroguanosine-3'-phosphate
  modified_base 15: mod_base = OTHER; note = 2'-O-methyladenosine-3'-phosphate
  modified_base 16: mod_base = OTHER; note = 2'-deoxy-2'-fluoroadenosine-3'-phosphate
  modified_base 17: mod_base = OTHER; note = 2'-O-methyluridine-3'-phosphate
  modified_base 18: mod_base = OTHER; note = 2'-O-methyluridine-3'-phosphate
  modified_base 19: mod_base = OTHER; note = 2'-O-methyluridine-3'-phosphate
  modified_base 20: mod_base = OTHER; note = 2'-O-methylcytidine-3'-phosphate
  modified_base 21: mod_base = OTHER; note = 2'-O-methyluridine-3'-phosphorothioate
  modified_base 22: mod_base = OTHER; note = 2'-O-methylcytidine-3'-phosphorothioate
  modified_base 23: mod_base = OTHER; note = 2'-O-methyluridine
aatagatgtagtagaatttctct

SEQ ID NO: 538 - RNA, 23 nt, synthetic construct
  source 1..23: mol_type = other RNA
  modified_base 1: mod_base = OTHER; note = 2'-O-methyladenosine-3'-phosphorothioate
  modified_base 2: mod_base = OTHER; note = 2'-deoxy-2'-fluoroadenosine-3'-phosphorothioate
  modified_base 3: mod_base = OTHER; note = 2'-O-methyladenosine-3'-phosphate
  modified_base 4: mod_base = OTHER; note = 2'-O-methyluridine-3'-phosphate
  modified_base 5: mod_base = OTHER; note = 2'-O-methyluridine-3'-phosphate
  modified_base 6: mod_base = OTHER; note = 2'-deoxy-2'-fluoroguanosine-3'-phosphate
  modified_base 7: mod_base = OTHER; note = 2'-O-methyluridine-3'-phosphate
  modified_base 8: mod_base = OTHER; note = 2'-deoxy-2'-fluoroadenosine-3'-phosphate
  modified_base 9: mod_base = OTHER; note = 2'-deoxy-2'-fluoroguanosine-3'-phosphate
  modified_base 10: mod_base = OTHER; note = 2'-O-methyladenosine-3'-phosphate
  modified_base 11: mod_base = OTHER; note = 2'-O-methylguanosine-3'-phosphate
  modified_base 12: mod_base = OTHER; note = 2'-O-methyladenosine-3'-phosphate
  modified_base 13: mod_base = OTHER; note = 2'-O-methyladenosine-3'-phosphate
  modified_base 14: mod_base = OTHER; note = 2'-deoxy-2'-fluorocytidine-3'-phosphate
  modified_base 15: mod_base = OTHER; note = 2'-O-methylguanosine-3'-phosphate
  modified_base 16: mod_base = OTHER; note = 2'-deoxy-2'-fluoroguanosine-3'-phosphate
  modified_base 17: mod_base = OTHER; note = 2'-O-methylcytidine-3'-phosphate
  modified_base 18: mod_base = OTHER; note = 2'-O-methyluridine-3'-phosphate
  modified_base 19: mod_base = OTHER; note = 2'-O-methylcytidine-3'-phosphate
  modified_base 20: mod_base = OTHER; note = 2'-O-methylguanosine-3'-phosphate
  modified_base 21: mod_base = OTHER; note = 2'-O-methylguanosine-3'-phosphorothioate
  modified_base 22: mod_base = OTHER; note = 2'-O-methyladenosine-3'-phosphorothioate
  modified_base 23: mod_base = OTHER; note = 2'-O-methyluridine
aaattgtagagaacggctcggat

SEQ ID NO: 539 - RNA, 23 nt, synthetic construct
  source 1..23: mol_type = other RNA
  modified_base 1: mod_base = OTHER; note = 2'-O-methyladenosine-3'-phosphorothioate
  modified_base 2: mod_base = OTHER; note = 2'-deoxy-2'-fluorouridine-3'-phosphorothioate
  modified_base 3: mod_base = OTHER; note = 2'-O-methyladenosine-3'-phosphate
  modified_base 4: mod_base = OTHER; note = 2'-O-methyladenosine-3'-phosphate
  modified_base 5: mod_base = OTHER; note = 2'-O-methyluridine-3'-phosphate
  modified_base 6: mod_base = OTHER; note = 2'-deoxy-2'-fluorouridine-3'-phosphate
  modified_base 7: mod_base = OTHER; note = 2'-O-methylguanosine-3'-phosphate
  modified_base 8: mod_base = OTHER; note = 2'-deoxy-2'-fluorouridine-3'-phosphate
  modified_base 9: mod_base = OTHER; note = 2'-deoxy-2'-fluoroadenosine-3'-phosphate
  modified_base 10: mod_base = OTHER; note = 2'-O-methylguanosine-3'-phosphate
  modified_base 11: mod_base = OTHER; note = 2'-O-methyladenosine-3'-phosphate
  modified_base 12: mod_base = OTHER; note = 2'-O-methylguanosine-3'-phosphate
  modified_base 13: mod_base = OTHER; note = 2'-O-methyladenosine-3'-phosphate
  modified_base 14: mod_base = OTHER; note = 2'-deoxy-2'-fluoroadenosine-3'-phosphate
  modified_base 15: mod_base = OTHER; note = 2'-O-methylcytidine-3'-phosphate
  modified_base 16: mod_base = OTHER; note = 2'-deoxy-2'-fluoroguanosine-3'-phosphate
  modified_base 17: mod_base = OTHER; note = 2'-O-methylguanosine-3'-phosphate
  modified_base 18: mod_base = OTHER; note = 2'-O-methylcytidine-3'-phosphate
  modified_base 19: mod_base = OTHER; note = 2'-O-methyluridine-3'-phosphate
  modified_base 20: mod_base = OTHER; note = 2'-O-methylcytidine-3'-phosphate
  modified_base 21: mod_base = OTHER; note = 2'-O-methylguanosine-3'-phosphorothioate
  modified_base 22: mod_base = OTHER; note = 2'-O-methylguanosine-3'-phosphorothioate
  modified_base 23: mod_base = OTHER; note = 2'-O-methyladenosine
ataattgtagagaacggctcgga

SEQ ID NO: 540 - RNA, 23 nt, synthetic construct
  source 1..23: mol_type = other RNA
  modified_base 1: mod_base = OTHER; note = 2'-O-methyladenosine-3'-phosphorothioate
  modified_base 2: mod_base = OTHER; note = 2'-deoxy-2'-fluoroguanosine-3'-phosphorothioate
  modified_base 3: mod_base = OTHER; note = 2'-O-methyluridine-3'-phosphate
  modified_base 4: mod_base = OTHER; note = 2'-O-methyladenosine-3'-phosphate
  modified_base 5: mod_base = OTHER; note = 2'-O-methyladenosine-3'-phosphate
  modified_base 6: mod_base = OTHER; note = 2'-deoxy-2'-fluorouridine-3'-phosphate
  modified_base 7: mod_base = OTHER; note = 2'-O-methyluridine-3'-phosphate
  modified_base 8: mod_base = OTHER; note = 2'-deoxy-2'-fluoroguanosine-3'-phosphate
  modified_base 9: mod_base = OTHER; note = 2'-deoxy-2'-fluorouridine-3'-phosphate
  modified_base 10: mod_base = OTHER; note = 2'-O-methyladenosine-3'-phosphate
  modified_base 11: mod_base = OTHER; note = 2'-O-methylguanosine-3'-phosphate
  modified_base 12: mod_base = OTHER; note = 2'-O-methyladenosine-3'-phosphate
  modified_base 13: mod_base = OTHER; note = 2'-O-methylguanosine-3'-phosphate
  modified_base 14: mod_base = OTHER; note = 2'-deoxy-2'-fluoroadenosine-3'-phosphate
  modified_base 15: mod_base = OTHER; note = 2'-O-methyladenosine-3'-phosphate
  modified_base 16: mod_base = OTHER; note = 2'-deoxy-2'-fluorocytidine-3'-phosphate
  modified_base 17: mod_base = OTHER; note = 2'-O-methylguanosine-3'-phosphate
  modified_base 18: mod_base = OTHER; note = 2'-O-methylguanosine-3'-phosphate
  modified_base 19: mod_base = OTHER; note = 2'-O-methylcytidine-3'-phosphate
  modified_base 20: mod_base = OTHER; note = 2'-O-methyluridine-3'-phosphate
  modified_base 21: mod_base = OTHER; note = 2'-O-methylcytidine-3'-phosphorothioate
  modified_base 22: mod_base = OTHER; note = 2'-O-methylguanosine-3'-phosphorothioate
  modified_base 23: mod_base = OTHER; note = 2'-O-methylguanosine
agtaattgtagagaacggctcgg

SEQ ID NO: 541 - RNA, 23 nt, synthetic construct
  source 1..23: mol_type = other RNA
atccgagccgttctctacaatta

SEQ ID NO: 542 - RNA, 23 nt, synthetic construct
  source 1..23: mol_type = other RNA
atccgagccgttctctacaatta

SEQ ID NO: 543 - RNA, 23 nt, synthetic construct
  source 1..23: mol_type = other RNA
atccgagccgttctctacaatta

SEQ ID NO: 544 - RNA, 21 nt, synthetic construct
  source 1..21: mol_type = other RNA
ccgagccgttctctacaatta

SEQ ID NO: 545 - RNA, 23 nt, synthetic construct
  source 1..23: mol_type = other RNA
atccgagccgttctctacaatta

SEQ ID NO: 546 - RNA, 23 nt, synthetic construct
  source 1..23: mol_type = other RNA
atccgagccgttctctacaatta

SEQ ID NO: 547 - RNA, 23 nt, synthetic construct
  source 1..23: mol_type = other RNA
atccgagccgttctctacaatta

SEQ ID NO: 548 - RNA, 23 nt, synthetic construct
  source 1..23: mol_type = other RNA
atccgagccgttctctacaatta

SEQ ID NO: 549 - RNA, 23 nt, synthetic construct
  source 1..23: mol_type = other RNA
atccgagccgttctctacaatta

SEQ ID NO: 550 - RNA, 23 nt, synthetic construct
  source 1..23: mol_type = other RNA
atccgagccgttctctacaatta

SEQ ID NO: 551 - RNA, 21 nt, synthetic construct
  source 1..21: mol_type = other RNA
ccgagccgttctctacaatta

SEQ ID NO: 552 - RNA, 21 nt, synthetic construct
  source 1..21: mol_type = other RNA
ccgagccgttctctacaatta

SEQ ID NO: 553 - RNA, 21 nt, synthetic construct
  source 1..21: mol_type = other RNA
ccgagccgttctctacaatta

SEQ ID NO: 554 - RNA, 23 nt, synthetic construct
  source 1..23: mol_type = other RNA
atccgagccgttctctacaatta

SEQ ID NO: 555 - RNA, 23 nt, synthetic construct
  source 1..23: mol_type = other RNA
tccgagccgttctctacaattac

SEQ ID NO: 556 - RNA, 23 nt, synthetic construct
  source 1..23: mol_type = other RNA
tccgagccgttctctacaattac

SEQ ID NO: 557 - RNA, 23 nt, synthetic construct
  source 1..23: mol_type = other RNA
tccgagccgttctctacaattac

SEQ ID NO: 558 - RNA, 21 nt, synthetic construct
  source 1..21: mol_type = other RNA
cgagccgttctctacaattac

SEQ ID NO: 559 - RNA, 23 nt, synthetic construct
  source 1..23: mol_type = other RNA
tccgagccgttctctacaattac

SEQ ID NO: 560 - RNA, 23 nt, synthetic construct
  source 1..23: mol_type = other RNA
tccgagccgttctctacaattac

SEQ ID NO: 561 - RNA, 23 nt, synthetic construct
  source 1..23: mol_type = other RNA
tccgagccgttctctacaattac

SEQ ID NO: 562 - RNA, 23 nt, synthetic construct
  source 1..23: mol_type = other RNA
tccgagccgttctctacaattac

SEQ ID NO: 563 - RNA, 23 nt, synthetic construct
  source 1..23: mol_type = other RNA
tccgagccgttctctacaattac

SEQ ID NO: 564 - RNA, 23 nt, synthetic construct
  source 1..23: mol_type = other RNA
tccgagccgttctctacaattac

SEQ ID NO: 565 - RNA, 21 nt, synthetic construct
  source 1..21: mol_type = other RNA
cgagccgttctctacaattac

SEQ ID NO: 566 - RNA, 21 nt, synthetic construct
  source 1..21: mol_type = other RNA
cgagccgttctctacaattac

SEQ ID NO: 567 - RNA, 21 nt, synthetic construct
  source 1..21: mol_type = other RNA
cgagccgttctctacaattac

SEQ ID NO: 568 - RNA, 23 nt, synthetic construct
  source 1..23: mol_type = other RNA
tccgagccgttctctacaattac

SEQ ID NO: 569 - RNA, 23 nt, synthetic construct
  source 1..23: mol_type = other RNA
ccgagccgttctctacaattacc

SEQ ID NO: 570 - RNA, 23 nt, synthetic construct
  source 1..23: mol_type = other RNA
ccgagccgttctctacaattacc

SEQ ID NO: 571 - RNA, 23 nt, synthetic construct
  source 1..23: mol_type = other RNA
ccgagccgttctctacaattacc

SEQ ID NO: 572 - RNA, 23 nt, synthetic construct
  source 1..23: mol_type = other RNA
ccgagccgttctctacaattacc

SEQ ID NO: 573 - RNA, 23 nt, synthetic construct
  source 1..23: mol_type = other RNA
ccgagccgttctctacaattacc

SEQ ID NO: 574 - RNA, 23 nt, synthetic construct
  source 1..23: mol_type = other RNA
ccgagccgttctctacaattacc

SEQ ID NO: 575 - RNA, 23 nt, synthetic construct
  source 1..23: mol_type = other RNA
ccgagccgttctctacaattacc

SEQ ID NO: 576 - RNA, 23 nt, synthetic construct
  source 1..23: mol_type = other RNA
ccgagccgttctctacaattacc

SEQ ID NO: 577 - RNA, 23 nt, synthetic construct
  source 1..23: mol_type = other RNA
ccgagccgttctctacaattacc

SEQ ID NO: 578 - RNA, 23 nt, synthetic construct
  source 1..23: mol_type = other RNA
ccgagccgttctctacaattacc

SEQ ID NO: 579 - RNA, 23 nt, synthetic construct
  source 1..23: mol_type = other RNA
ccgagccgttctctacaattacc

SEQ ID NO: 580 - RNA, 23 nt, synthetic construct
  source 1..23: mol_type = other RNA
ccgagccgttctctacaattacc

SEQ ID NO: 581 - RNA, 23 nt, synthetic construct
  source 1..23: mol_type = other RNA
ccgagccgttctctacaattacc

SEQ ID NO: 582 - RNA, 23 nt, synthetic construct
  source 1..23: mol_type = other RNA
ccgagccgttctctacaattacc

SEQ ID NO: 583 - RNA, 23 nt, synthetic construct
  source 1..23: mol_type = other RNA
ccgagccgttctctacaattacc

SEQ ID NO: 584 - RNA, 23 nt, synthetic construct
  source 1..23: mol_type = other RNA
ccgagccgttctctacaattacc

SEQ ID NO: 585 - RNA, 23 nt, synthetic construct
  source 1..23: mol_type = other RNA
ccgagccgttctctacaattacc

SEQ ID NO: 586 - RNA, 23 nt, synthetic construct
  source 1..23: mol_type = other RNA
ccgagccgttctctacaattacc

SEQ ID NO: 587 - RNA, 23 nt, synthetic construct
  source 1..23: mol_type = other RNA
ccgagccgttctctacaattacc

SEQ ID NO: 588 - RNA, 23 nt, synthetic construct
  source 1..23: mol_type = other RNA
ccgagccgttctctacaattacc

SEQ ID NO: 589 - RNA, 23 nt, synthetic construct
  source 1..23: mol_type = other RNA
ccgagccgttctctacaattacc

SEQ ID NO: 590 - RNA, 23 nt, synthetic construct
  source 1..23: mol_type = other RNA
ccgagccgttctctacaattacc

SEQ ID NO: 591 - RNA, 23 nt, synthetic construct
  source 1..23: mol_type = other RNA
ccgagccgttctctacaattacc

SEQ ID NO: 592 - RNA, 23 nt, synthetic construct
  source 1..23: mol_type = other RNA
ccgagccgttctctacaattacc

SEQ ID NO: 593 - RNA, 23 nt, synthetic construct
  source 1..23: mol_type = other RNA
ccgagccgttctctacaattacc

SEQ ID NO: 594 - RNA, 23 nt, synthetic construct
  source 1..23: mol_type = other RNA
ccgagccgttctctacaattacc

SEQ ID NO: 595 - RNA, 23 nt, synthetic construct
  source 1..23: mol_type = other RNA
ccgagccgttctctacaattacc

SEQ ID NO: 596 - RNA, 23 nt, synthetic construct
  source 1..23: mol_type = other RNA
ccgagccgttctctacaattacc

SEQ ID NO: 597 - RNA, 23 nt, synthetic construct
  source 1..23: mol_type = other RNA
ccgagccgttctctacaattacc

SEQ ID NO: 598 - RNA, 23 nt, synthetic construct
  source 1..23: mol_type = other RNA
ccgagccgttctctacaattacc

SEQ ID NO: 599 - RNA, 23 nt, synthetic construct
  source 1..23: mol_type = other RNA
cagagaaattctactacatctat

SEQ ID NO: 600 - RNA, 23 nt, synthetic construct
  source 1..23: mol_type = other RNA
cagagaaattctactacatctat

SEQ ID NO: 601 - RNA, 23 nt, synthetic construct
  source 1..23: mol_type = other RNA
cagagaaattctactacatctat

SEQ ID NO: 602 - RNA, 21 nt, synthetic construct
  source 1..21: mol_type = other RNA
gagaaattctactacatctat

SEQ ID NO: 603 - RNA, 23 nt, synthetic construct
  source 1..23: mol_type = other RNA
cagagaaattctactacatctat

SEQ ID NO: 604 - RNA, 23 nt, synthetic construct
  source 1..23: mol_type = other RNA
cagagaaattctactacatctat

SEQ ID NO: 605 - RNA, 23 nt, synthetic construct
  source 1..23: mol_type = other RNA
cagagaaattctactacatctat

SEQ ID NO: 606 - RNA, 23 nt, synthetic construct
  source 1..23: mol_type = other RNA
cagagaaattctactacatctat

SEQ ID NO: 607 - RNA, 23 nt, synthetic construct
  source 1..23: mol_type = other RNA
cagagaaattctactacatctat

SEQ ID NO: 608 - RNA, 23 nt, synthetic construct
  source 1..23: mol_type = other RNA
agagaaattctactacatctata

SEQ ID NO: 609 - RNA, 23 nt, synthetic construct
  source 1..23: mol_type = other RNA
agagaaattctactacatctata

SEQ ID NO: 610 - RNA, 23 nt, synthetic construct
  source 1..23: mol_type = other RNA
agagaaattctactacatctata

SEQ ID NO: 611 - RNA, 23 nt, synthetic construct
  source 1..23: mol_type = other RNA
agagaaattctactacatctata

SEQ ID NO: 612 - RNA, 23 nt, synthetic construct
  source 1..23: mol_type = other RNA
agagaaattctactacatctata

SEQ ID NO: 613 - RNA, 23 nt, synthetic construct
  source 1..23: mol_type = other RNA
agagaaattctactacatctata

SEQ ID NO: 614 - RNA, 21 nt, synthetic construct
  source 1..21: mol_type = other RNA
agaaattctactacatctata

SEQ ID NO: 615 - RNA, 21 nt, synthetic construct
  source 1..21: mol_type = other RNA
agaaattctactacatctata

SEQ ID NO: 616 - RNA, 23 nt, synthetic construct
  source 1..23: mol_type = other RNA
agagaaattctactacatctata

SEQ ID NO: 617 - RNA, 23 nt, synthetic construct
  source 1..23: mol_type = other RNA
agagaaattctactacatctata

SEQ ID NO: 618 - RNA, 23 nt, synthetic construct
  source 1..23: mol_type = other RNA
agagaaattctactacatctata

SEQ ID NO: 619 - RNA, 23 nt, synthetic construct
  source 1..23: mol_type = other RNA
agagaaattctactacatctata

SEQ ID NO: 620 - RNA, 23 nt, synthetic construct
  source 1..23: mol_type = other RNA
agagaaattctactacatctata

SEQ ID NO: 621 - RNA, 23 nt, synthetic construct
  source 1..23: mol_type = other RNA
agagaaattctactacatctata

SEQ ID NO: 622 - RNA, 21 nt, synthetic construct
  source 1..21: mol_type = other RNA
agaaattctactacatctata

SEQ ID NO: 623 - RNA, 21 nt, synthetic construct
  source 1..21: mol_type = other RNA
agaaattctactacatctata

SEQ ID NO: 624 - RNA, 21 nt, synthetic construct
  source 1..21: mol_type = other RNA
agaaattctactacatctata

SEQ ID NO: 625 - RNA, 23 nt, synthetic construct
  source 1..23: mol_type = other RNA
agagaaattctactacatctata

SEQ ID NO: 626 - RNA, 23 nt, synthetic construct
  source 1..23: mol_type = other RNA
cagagaaattctactacatctat

SEQ ID NO: 627 - RNA, 23 nt, synthetic construct
  source 1..23: mol_type = other RNA
agagaaattctactacatctata

SEQ ID NO: 628 - RNA, 23 nt, synthetic construct
  source 1..23: mol_type = other RNA
atccgagccgttctctacaatta

SEQ ID NO: 629 - RNA, 23 nt, synthetic construct
  source 1..23: mol_type = other RNA
tccgagccgttctctacaattac

SEQ ID NO: 630 - RNA, 23 nt, synthetic construct
  source 1..23: mol_type = other RNA
ccgagccgttctctacaattacc

SEQ ID NO: 631 - RNA, 23 nt, synthetic construct
  source 1..23: mol_type = other RNA
  modified_base 5: mod_base = OTHER; note = 5'-methyluridine-3'-phosphate
  modified_base 7: mod_base = OTHER; note = 5'-methyluridine-3'-phosphate
aaattgtagagaacggctcggat

SEQ ID NO: 632 - RNA, 23 nt, synthetic construct
  source 1..23: mol_type = other RNA
  modified_base 2: mod_base = OTHER; note = 5'-methyluridine-3'-phosphate
atagatgtagtagaatttctctg

SEQ ID NO: 633 - RNA, 23 nt, synthetic construct
  source 1..23: mol_type = other RNA
  modified_base 7: mod_base = OTHER; note = 5'-methyluridine-3'-phosphate
  modified_base 12: mod_base = OTHER; note = 5'-methyluridine-3'-phosphate
aatagatgtagtagaatttctct

SEQ ID NO: 634 - RNA, 23 nt, synthetic construct
  source 1..23: mol_type = other RNA
ttgactgtgaaaccctcattttc

SEQ ID NO: 635 - RNA, 23 nt, synthetic construct
  source 1..23: mol_type = other RNA
tgcttaccagggtcctcccagcg

SEQ ID NO: 636 - RNA, 23 nt, synthetic construct
  source 1..23: mol_type = other RNA
tcgaacaacagagtagggtagcc

SEQ ID NO: 637 - RNA, 23 nt, synthetic construct
  source 1..23: mol_type = other RNA
tttggccttagcatggtacattg

SEQ ID NO: 638 - RNA, 23 nt, synthetic construct
  source 1..23: mol_type = other RNA
tttctcactggacagcactagtt

SEQ ID NO: 639 - RNA, 23 nt, synthetic construct
  source 1..23: mol_type = other RNA
tatcaaggttcagttcctggtgg

SEQ ID NO: 640 - RNA, 23 nt, synthetic construct
  source 1..23: mol_type = other RNA
tccaggtagatgatgagggtgtt

SEQ ID NO: 641 - RNA, 23 nt, synthetic construct
  source 1..23: mol_type = other RNA
tgatgaagaggtacccgctctgc

SEQ ID NO: 642 - RNA, 23 nt, synthetic construct
  source 1..23: mol_type = other RNA
tgatgaagaggtacccgctctgc

SEQ ID NO: 643 - RNA, 23 nt, synthetic construct
  source 1..23: mol_type = other RNA
tgatgaagaggtacccgctctgc

SEQ ID NO: 644 - RNA, 23 nt, synthetic construct
  source 1..23: mol_type = other RNA
ttccggctcagcacaacctcccc

SEQ ID NO: 645 - RNA, 23 nt, synthetic construct
  source 1..23: mol_type = other RNA
tgatcttccactggcccatgttg

SEQ ID NO: 646 - RNA, 23 nt, synthetic construct
  source 1..23: mol_type = other RNA
tctaggccgaacttctcccactg

SEQ ID NO: 647 - RNA, 23 nt, synthetic construct
  source 1..23: mol_type = other RNA
tctggttctgagaagacaaggag

SEQ ID NO: 648 - RNA, 23 nt, synthetic construct
  source 1..23: mol_type = other RNA
tgaccagtcgggtcttgtacaca

SEQ ID NO: 649 - RNA, 23 nt, synthetic construct
  source 1..23: mol_type = other RNA
ttcgaaactgggcagcacgtact

SEQ ID NO: 650 - RNA, 23 nt, synthetic construct
  source 1..23: mol_type = other RNA
tagacatagtggcatcctggtct

SEQ ID NO: 651 - RNA, 23 nt, synthetic construct
  source 1..23: mol_type = other RNA
  modified_base 2: mod_base = OTHER; note = 5'-methyluridine-3'-phosphate
  modified_base 5: mod_base = OTHER; note = 5'-methyluridine-3'-phosphate
  modified_base 12: mod_base = OTHER; note = 5'-methyluridine-3'-phosphate
attcttcttattcagcacgaaca

SEQ ID NO: 652 - RNA, 23 nt, synthetic construct
  source 1..23: mol_type = other RNA
agatgtagtagaatttctctgta

SEQ ID NO: 653 - RNA, 23 nt, synthetic construct
  source 1..23: mol_type = other RNA
  modified_base 5: mod_base = OTHER; note = 5'-methyluridine-3'-phosphate
  modified_base 7: mod_base = OTHER; note = 5'-methyluridine-3'-phosphate
aaagtcttttagctgcagtaggg

SEQ ID NO: 654 - RNA, 23 nt, synthetic construct
  source 1..23: mol_type = other RNA
  modified_base 2: mod_base = OTHER; note = 5'-methyluridine-3'-phosphate
  modified_base 7: mod_base = OTHER; note = 5'-methyluridine-3'-phosphate
  modified_base 12: mod_base = OTHER; note = 5'-methyluridine-3'-phosphate
atggcattgtttctggttctctt

SEQ ID NO: 655 - RNA, 23 nt, synthetic construct
  source 1..23: mol_type = other RNA
  modified_base 2: mod_base = OTHER; note = 5'-methyluridine-3'-phosphate
tttggccttagcatggtacattg

SEQ ID NO: 656 - RNA, 23 nt, synthetic construct
  source 1..23: mol_type = other RNA
  modified_base 2: mod_base = OTHER; note = 5'-methyluridine-3'-phosphate
attgagccaacgcacgacgggag

SEQ ID NO: 657 - RNA, 23 nt, synthetic construct
  source 1..23: mol_type = other RNA
  modified_base 2: mod_base = OTHER; note = 5'-methyluridine-3'-phosphate
  modified_base 5: mod_base = OTHER; note = 5'-methyluridine-3'-phosphate
tttctcactggacagcactagtt

SEQ ID NO: 658 - RNA, 23 nt, synthetic construct
  source 1..23: mol_type = other RNA
  modified_base 2: mod_base = OTHER; note = 5'-methyluridine-3'-phosphate
ttgactgtgaaaccctcattttc

SEQ ID NO: 659 - RNA, 23 nt, synthetic construct
  source 1..23: mol_type = other RNA
  modified_base 7: mod_base = OTHER; note = 5'-methyluridine-3'-phosphate
agtaattgttggagttgcccacg

SEQ ID NO: 660 - RNA, 23 nt, synthetic construct
  source 1..23: mol_type = other RNA
  modified_base 7: mod_base = OTHER; note = 5'-methyluridine-3'-phosphate
agttgatctttggccttagcatg

SEQ ID NO: 661 - RNA, 23 nt, synthetic construct
  source 1..23: mol_type = other RNA
  modified_base 7: mod_base = OTHER; note = 5'-methyluridine-3'-phosphate
  modified_base 12: mod_base = OTHER; note = 5'-methyluridine-3'-phosphate
acttggtctcttctgatcgcagg

SEQ ID NO: 662 - RNA, 23 nt, synthetic construct
  source 1..23: mol_type = other RNA
  modified_base 2: mod_base = OTHER; note = 5'-methyluridine-3'-phosphate
atgtagatggtcttgtctgtctg

SEQ ID NO: 663 - RNA, 23 nt, synthetic construct
  source 1..23: mol_type = other RNA
aatgaagaagtcctgcattactg

SEQ ID NO: 664 - RNA, 23 nt, synthetic construct
  source 1..23: mol_type = other RNA
tatcaaggttcagttcctggtgg

SEQ ID NO: 665 - RNA, 23 nt, synthetic construct
  source 1..23: mol_type = other RNA
  modified_base 7: mod_base = OTHER; note = 5'-methyluridine-3'-phosphate
agttcattgagccaacgcacgac

SEQ ID NO: 666 - RNA, 23 nt, synthetic construct
  source 1..23: mol_type = other RNA
  modified_base 2: mod_base = OTHER; note = 5'-methyluridine-3'-phosphate
  modified_base 5: mod_base = OTHER; note = 5'-methyluridine-3'-phosphate
  modified_base 7: mod_base = OTHER; note = 5'-methyluridine-3'-phosphate
atcttgtacacatagtccactcc

SEQ ID NO: 667 - RNA, 23 nt, synthetic construct
  source 1..23: mol_type = other RNA
  modified_base 2: mod_base = OTHER; note = 5'-methyluridine-3'-phosphate
ttcgaaactgggcagcacgtact

SEQ ID NO: 668 - RNA, 23 nt, synthetic construct
  source 1..23: mol_type = other RNA
tcgaacaacagagtagggtagcc

SEQ ID NO: 669 - RNA, 23 nt, synthetic construct
  source 1..23: mol_type = other RNA
  modified_base 5: mod_base = OTHER; note = 5'-methyluridine-3'-phosphate
  modified_base 7: mod_base = OTHER; note = 5'-methyluridine-3'-phosphate
actgtctggatgaagaggtaccc

SEQ ID NO: 670 - RNA, 23 nt, synthetic construct
  source 1..23: mol_type = other RNA
  modified_base 5: mod_base = OTHER; note = 5'-methyluridine-3'-phosphate
agattcccagtggatacggtggg

SEQ ID NO: 671 - RNA, 23 nt, synthetic construct
  source 1..23: mol_type = other RNA
  modified_base 7: mod_base = OTHER; note = 5'-methyluridine-3'-phosphate
acttcttattcagcacgaacacg

SEQ ID NO: 672 - RNA, 23 nt, synthetic construct
  source 1..23: mol_type = other RNA
  modified_base 2: mod_base = OTHER; note = 5'-methyluridine-3'-phosphate
  modified_base 7: mod_base = OTHER; note = 5'-methyluridine-3'-phosphate
atgccttccgggttctcaatgtt

SEQ ID NO: 673 - RNA, 23 nt, synthetic construct
  source 1..23: mol_type = other RNA
  modified_base 7: mod_base = OTHER; note = 5'-methyluridine-3'-phosphate
agaaatttgttaagaagaggccc

SEQ ID NO: 674 - RNA, 23 nt, synthetic construct
  source 1..23: mol_type = other RNA
  modified_base 7: mod_base = OTHER; note = 5'-methyluridine-3'-phosphate
aggtcttgtacacatagtccact

SEQ ID NO: 675 - RNA, 23 nt, synthetic construct
  source 1..23: mol_type = other RNA
  modified_base 5: mod_base = OTHER; note = 5'-methyluridine-3'-phosphate
tgcttaccagggtcctcccagcg

SEQ ID NO: 676 - RNA, 23 nt, synthetic construct
  source 1..23: mol_type = other RNA
  modified_base 2: mod_base = OTHER; note = 5'-methyluridine-3'-phosphate
ttccggctcagcacaacctcccc

SEQ ID NO: 677 - RNA, 23 nt, synthetic construct
  source 1..23: mol_type = other RNA
  modified_base 2: mod_base = OTHER; note = 5'-methyluridine-3'-phosphate
  modified_base 12: mod_base = OTHER; note = 5'-methyluridine-3'-phosphate
atctctgtaggttcatgtagttg

SEQ ID NO: 678 - RNA, 23 nt, synthetic construct
  source 1..23: mol_type = other RNA
  modified_base 7: mod_base = OTHER; note = 5'-methyluridine-3'-phosphate
tctggttctgagaagacaaggag

SEQ ID NO: 679 - RNA, 23 nt, synthetic construct
  source 1..23: mol_type = other RNA
  modified_base 7: mod_base = OTHER; note = 5'-methyluridine-3'-phosphate
tagacatagtggcatcctggtct

SEQ ID NO: 680 - RNA, 23 nt, synthetic construct
  source 1..23: mol_type = other RNA
  modified_base 2: mod_base = OTHER; note = 5'-methyluridine-3'-phosphate
atcccgctgcgctctgcctgcac

SEQ ID NO: 681 - RNA, 23 nt, synthetic construct
  source 1..23: mol_type = other RNA
  modified_base 7: mod_base = OTHER; note = 5'-methyluridine-3'-phosphate
tccaggtagatgatgagggtgtt

SEQ ID NO: 682 - RNA, 23 nt, synthetic construct
  source 1..23: mol_type = other RNA
  modified_base 2: mod_base = OTHER; note = 5'-methyluridine-3'-phosphate
  modified_base 5: mod_base = OTHER; note = 5'-methyluridine-3'-phosphate
atcttggtgaagtggatctggta

SEQ ID NO: 683 - RNA, 23 nt, synthetic construct
  source 1..23: mol_type = other RNA
  modified_base 7: mod_base = OTHER; note = 5'-methyluridine-3'-phosphate
  modified_base 12: mod_base = OTHER; note = 5'-methyluridine-3'-phosphate
tgatcttccactggcccatgttg

SEQ ID NO: 684 - RNA, 23 nt, synthetic construct
  source 1..23: mol_type = other RNA
  modified_base 7: mod_base = OTHER; note = 5'-methyluridine-3'-phosphate
  modified_base 12: mod_base = OTHER; note = 5'-methyluridine-3'-phosphate
agttcttatctttggctgtggtc

SEQ ID NO: 685 - RNA, 23 nt, synthetic construct
  source 1..23: mol_type = other RNA
tgaccagtcgggtcttgtacaca

SEQ ID NO: 686 - RNA, 23 nt, synthetic construct
  source 1..23: mol_type = other RNA
tctaggccgaacttctcccactg

SEQ ID NO: 687 - RNA, 23 nt, synthetic construct
  source 1..23: mol_type = other RNA
  modified_base 12: mod_base = OTHER; note = 5'-methyluridine-3'-phosphate
tgatgaagaggtacccgctctgc

SEQ ID NO: 688 - RNA, 23 nt, synthetic construct
  source 1..23: mol_type = other RNA
  modified_base 2: mod_base = OTHER; note = 5'-methyluridine-3'-phosphate
  modified_base 7: mod_base = OTHER; note = 5'-methyluridine-3'-phosphate
atgtaataggcgtagaccttgac

SEQ ID NO: 689 - RNA, 23 nt, synthetic construct
  source 1..23: mol_type = other RNA
  modified_base 12: mod_base = OTHER; note = 5'-methyluridine-3'-phosphate
aatgaagcaattctcctcagcac

SEQ ID NO: 690 - RNA, 23 nt, synthetic construct
  source 1..23: mol_type = other RNA
actgtctggatgaagaggtaccc

SEQ ID NO: 691 - RNA, 23 nt, synthetic construct
  source 1..23: mol_type = other RNA
atgtagatggtcttgtctgtctg

SEQ ID NO: 692 - RNA, 23 nt, synthetic construct
  source 1..23: mol_type = other RNA
atgccttccgggttctcaatgtt

SEQ ID NO: 693 - RNA, 23 nt, synthetic construct
  source 1..23: mol_type = other RNA
agatgtagtagaatttctctgta

SEQ ID NO: 694 - RNA, 23 nt, synthetic construct
  source 1..23: mol_type = other RNA
atagatgtagtagaatttctctg

SEQ ID NO: 695 - RNA, 23 nt, synthetic construct
  source 1..23: mol_type = other RNA
aatagatgtagtagaatttctct

SEQ ID NO: 696 - RNA, 23 nt, synthetic construct
  source 1..23: mol_type = other RNA
atcccgctgcgctctgcctgcac

SEQ ID NO: 697 - RNA, 23 nt, synthetic construct
  source 1..23: mol_type = other RNA
atcttggtgaagtggatctggta

SEQ ID NO: 698 - RNA, 23 nt, synthetic construct
  source 1..23: mol_type = other RNA
agtaattgttggagttgcccacg

SEQ ID NO: 699 - RNA, 23 nt, synthetic construct
  source 1..23: mol_type = other RNA
acttcttattcagcacgaacacg

SEQ ID NO: 700 - RNA, 23 nt, synthetic construct
  source 1..23: mol_type = other RNA
attcttcttattcagcacgaaca

SEQ ID NO: 701 - RNA, 23 nt, synthetic construct
  source 1..23: mol_type = other RNA
aatgaagaagtcctgcattactg

SEQ ID NO: 702 - RNA, 23 nt, synthetic construct
  source 1..23: mol_type = other RNA
aaattgtagagaacggctcggat

SEQ ID NO: 703 - RNA, 23 nt, synthetic construct
  source 1..23: mol_type = other RNA
atctctgtaggttcatgtagttg

SEQ ID NO: 704 - RNA, 23 nt, synthetic construct
  source 1..23: mol_type = other RNA
agaaatttgttaagaagaggccc

SEQ ID NO: 705 - RNA, 23 nt, synthetic construct
  source 1..23: mol_type = other RNA
agttcttatctttggctgtggtc

SEQ ID NO: 706 - RNA, 23 nt, synthetic construct
  source 1..23: mol_type = other RNA
aaagtcttttagctgcagtaggg

SEQ ID NO: 707 - RNA, 23 nt, synthetic construct
  source 1..23: mol_type = other RNA
attgagccaacgcacgacgggag

SEQ ID NO: 708 - RNA, 23 nt, synthetic construct
  source 1..23: mol_type = other RNA
agttcattgagccaacgcacgac

SEQ ID NO: 709 - RNA, 23 nt, synthetic construct
  source 1..23: mol_type = other RNA
agattcccagtggatacggtggg

SEQ ID NO: 710 - RNA, 23 nt, synthetic construct
  source 1..23: mol_type = other RNA
acttggtctcttctgatcgcagg

SEQ ID NO: 711 - RNA, 23 nt, synthetic construct
  source 1..23: mol_type = other RNA
agttgatctttggccttagcatg

SEQ ID NO: 712 - RNA, 23 nt, synthetic construct
  source 1..23: mol_type = other RNA
atgtaataggcgtagaccttgac

SEQ ID NO: 713 - RNA, 23 nt, synthetic construct
  source 1..23: mol_type = other RNA
atgtaataggcgtagaccttgac

SEQ ID NO: 714 - RNA, 23 nt, synthetic construct
  source 1..23: mol_type = other RNA
atgtaataggcgtagaccttgac

SEQ ID NO: 715 - RNA, 23 nt, synthetic construct
  source 1..23: mol_type = other RNA
aatgaagcaattctcctcagcac

SEQ ID NO: 716 - RNA, 23 nt, synthetic construct
  source 1..23: mol_type = other RNA
aatgaagcaattctcctcagcac

SEQ ID NO: 717 - RNA, 23 nt, synthetic construct
  source 1..23: mol_type = other RNA
aatgaagcaattctcctcagcac

SEQ ID NO: 718 - RNA, 23 nt, synthetic construct
  source 1..23: mol_type = other RNA
atcttgtacacatagtccactcc

SEQ ID NO: 719 - RNA, 23 nt, synthetic construct
  source 1..23: mol_type = other RNA
aggtcttgtacacatagtccact

SEQ ID NO: 720 - RNA, 23 nt, synthetic construct
  source 1..23: mol_type = other RNA
atggcattgtttctggttctctt

SEQ ID NO: 721 - DNA, 23 bp, synthetic construct
  source 1..23: mol_type = other DNA
  modified_base 1: mod_base = OTHER; note = 2'-O-methyladenosine-3'-phosphorothioate
  modified_base 2: mod_base = OTHER; note = 2'-deoxyadenosine-3'-phosphorothioate
  modified_base 3: mod_base = OTHER; note = 2'-O-methyladenosine-3'-phosphate
  modified_base 4: mod_base = OTHER; note = 2'-O-methyluridine-3'-phosphate
  modified_base 6: mod_base = OTHER; note = 2'-O-methylguanosine-3'-phosphate
  modified_base 8: mod_base = OTHER; note = 2'-O-methyladenosine-3'-phosphate
  modified_base 9: mod_base = OTHER; note = 2'-O-methylguanosine-3'-phosphate
  modified_base 10: mod_base = OTHER; note = 2'-O-methyladenosine-3'-phosphate
  modified_base 11: mod_base = OTHER; note = 2'-O-methylguanosine-3'-phosphate
  modified_base 13: mod_base = OTHER; note = 2'-O-methyladenosine-3'-phosphate
  modified_base 14: mod_base = OTHER; note = 2'-deoxy-2'-fluorocytidine-3'-phosphate
  modified_base 15: mod_base = OTHER; note = 2'-O-methylguanosine-3'-phosphate
  modified_base 16: mod_base = OTHER; note = 2'-O-methylguanosine-3'-phosphate
  modified_base 17: mod_base = OTHER; note = 2'-O-methylcytidine-3'-phosphate
  modified_base 18: mod_base = OTHER; note = 2'-O-methyluridine-3'-phosphate
  modified_base 19: mod_base = OTHER; note = 2'-O-methylcytidine-3'-phosphate
  modified_base 20: mod_base = OTHER; note = 2'-O-methylguanosine-3'-phosphate
  modified_base 21: mod_base = OTHER; note = 2'-O-methylguanosine-3'-phosphorothioate
  modified_base 22: mod_base = OTHER; note = 2'-O-methyladenosine-3'-phosphorothioate
  modified_base 23: mod_base = OTHER; note = 2'-O-methyluridine
  misc_feature 1: note = RNA
  misc_feature 3..4: note = RNA
  misc_feature 6: note = RNA
  misc_feature 8..11: note = RNA
  misc_feature 13..23: note = RNA
  misc_feature 2: note = DNA
  misc_feature 5: note = DNA
  misc_feature 7: note = DNA
  misc_feature 12: note = DNA
aaattgtagagaacggctcggat

SEQ ID NO: 722 - DNA, 23 bp, synthetic construct
  source 1..23: mol_type = other DNA
  modified_base 1: mod_base = OTHER; note = 2'-O-methyladenosine-3'-phosphorothioate
  modified_base 2: mod_base = OTHER; note = 2'-deoxythymidine-3'-phosphorothioate
  modified_base 3: mod_base = OTHER; note = 2'-O-methyladenosine-3'-phosphate
  modified_base 4: mod_base = OTHER; note = 2'-O-methylguanosine-3'-phosphate
  modified_base 6: mod_base = OTHER; note = 2'-O-methyluridine-3'-phosphate
  modified_base 8: mod_base = OTHER; note = 2'-O-methyluridine-3'-phosphate
  modified_base 9: mod_base = OTHER; note = 2'-O-methyladenosine-3'-phosphate
  modified_base 10: mod_base = OTHER; note = 2'-O-methylguanosine-3'-phosphate
  modified_base 11: mod_base = OTHER; note = 2'-O-methyluridine-3'-phosphate
  modified_base 13: mod_base = OTHER; note = 2'-O-methylguanosine-3'-phosphate
  modified_base 14: mod_base = OTHER; note = 2'-deoxy-2'-fluoroadenosine-3'-phosphate
  modified_base 15: mod_base = OTHER; note = 2'-O-methyladenosine-3'-phosphate
  modified_base 16: mod_base = OTHER; note = 2'-O-methyluridine-3'-phosphate
  modified_base 17: mod_base = OTHER; note = 2'-O-methyluridine-3'-phosphate
  modified_base 18: mod_base = OTHER; note = 2'-O-methyluridine-3'-phosphate
  modified_base 19: mod_base = OTHER; note = 2'-O-methylcytidine-3'-phosphate
  modified_base 20: mod_base = OTHER; note = 2'-O-methyluridine-3'-phosphate
  modified_base 21: mod_base = OTHER; note = 2'-O-methylcytidine-3'-phosphorothioate
  modified_base 22: mod_base = OTHER; note = 2'-O-methyluridine-3'-phosphorothioate
  modified_base 23: mod_base = OTHER; note = 2'-O-methylguanosine
  misc_feature 1: note = RNA
  misc_feature 3..4: note = RNA
  misc_feature 6: note = RNA
  misc_feature 8..11: note = RNA
  misc_feature 13..23: note = RNA
  misc_feature 2: note = DNA
  misc_feature 5: note = DNA
  misc_feature 7: note = DNA
  misc_feature 12: note = DNA
atagatgtagtagaatttctctg

SEQ ID NO: 723 - DNA, 23 bp, synthetic construct
  source 1..23: mol_type = other DNA
  modified_base 1: mod_base = OTHER; note = 2'-O-methyladenosine-3'-phosphorothioate
  modified_base 2: mod_base = OTHER; note = 2'-deoxyadenosine-3'-phosphorothioate
  modified_base 3: mod_base = OTHER; note = 2'-O-methyluridine-3'-phosphate
  modified_base 4: mod_base = OTHER; note = 2'-O-methyladenosine-3'-phosphate
  modified_base 6: mod_base = OTHER; note = 2'-O-methyladenosine-3'-phosphate
  modified_base 8: mod_base = OTHER; note = 2'-O-methylguanosine-3'-phosphate
  modified_base 9: mod_base = OTHER; note = 2'-O-methyluridine-3'-phosphate
  modified_base 10: mod_base = OTHER; note = 2'-O-methyladenosine-3'-phosphate
  modified_base 11: mod_base = OTHER; note = 2'-O-methylguanosine-3'-phosphate
  modified_base 13: mod_base = OTHER; note = 2'-O-methyladenosine-3'-phosphate
  modified_base 14: mod_base = OTHER; note = 2'-deoxy-2'-fluoroguanosine-3'-phosphate
  modified_base 15: mod_base = OTHER; note = 2'-O-methyladenosine-3'-phosphate
  modified_base 16: mod_base = OTHER; note = 2'-O-methyladenosine-3'-phosphate
  modified_base 17: mod_base = OTHER; note = 2'-O-methyluridine-3'-phosphate
  modified_base 18: mod_base = OTHER; note = 2'-O-methyluridine-3'-phosphate
  modified_base 19: mod_base = OTHER; note = 2'-O-methyluridine-3'-phosphate
  modified_base 20: mod_base = OTHER; note = 2'-O-methylcytidine-3'-phosphate
  modified_base 21: mod_base = OTHER; note = 2'-O-methyluridine-3'-phosphorothioate
  modified_base 22: mod_base = OTHER; note = 2'-O-methylcytidine-3'-phosphorothioate
  modified_base 23: mod_base = OTHER; note = 2'-O-methyluridine
  misc_feature 1: note = RNA
  misc_feature 3..4: note = RNA
  misc_feature 6: note = RNA
  misc_feature 8..11: note = RNA
  misc_feature 13..23: note = RNA
  misc_feature 2: note = DNA
  misc_feature 5: note = DNA
  misc_feature 7: note = DNA
  misc_feature 12: note = DNA
aatagatgtagtagaatttctct

SEQ ID NO: 724 - RNA, 23 nt, synthetic construct
  source 1..23: mol_type = other RNA
  modified_base 1: mod_base = OTHER; note = 2'-O-methyluridine-3'-phosphorothioate
  modified_base 2: mod_base = OTHER; note = 2'-deoxy-2'-fluorouridine-3'-phosphorothioate
  modified_base 3: mod_base = OTHER; note = 2'-O-methylguanosine-3'-phosphate
  modified_base 4: mod_base = OTHER; note = 2'-O-methyladenosine-3'-phosphate
  modified_base 5: mod_base = OTHER; note = 2'-O-methylcytidine-3'-phosphate
  modified_base 6: mod_base = OTHER; note = 2'-deoxy-2'-fluorouridine-3'-phosphate
  modified_base 7: mod_base = OTHER; note = 2'-O-methylguanosine-3'-phosphate
  modified_base 8: mod_base = OTHER; note = 2'-deoxy-2'-fluorouridine-3'-phosphate
  modified_base 9: mod_base = OTHER; note = 2'-deoxy-2'-fluoroguanosine-3'-phosphate
  modified_base 10: mod_base = OTHER; note = 2'-O-methyladenosine-3'-phosphate
  modified_base 11: mod_base = OTHER; note = 2'-O-methyladenosine-3'-phosphate
  modified_base 12: mod_base = OTHER; note = 2'-O-methyladenosine-3'-phosphate
  modified_base 13: mod_base = OTHER; note = 2'-O-methylcytidine-3'-phosphate
  modified_base 14: mod_base = OTHER; note = 2'-deoxy-2'-fluorocytidine-3'-phosphate
  modified_base 15: mod_base = OTHER; note = 2'-O-methylcytidine-3'-phosphate
  modified_base 16: mod_base = OTHER; note = 2'-deoxy-2'-fluorouridine-3'-phosphate
  modified_base 17: mod_base = OTHER; note = 2'-O-methylcytidine-3'-phosphate
  modified_base 18: mod_base = OTHER; note = 2'-O-methyladenosine-3'-phosphate
  modified_base 19: mod_base = OTHER; note = 2'-O-methyluridine-3'-phosphate
  modified_base 20: mod_base = OTHER; note = 2'-O-methyluridine-3'-phosphate
  modified_base 21: mod_base = OTHER; note = 2'-O-methyluridine-3'-phosphorothioate
  modified_base 22: mod_base = OTHER; note = 2'-O-methyluridine-3'-phosphorothioate
  modified_base 23: mod_base = OTHER; note = 2'-O-methylcytidine
ttgactgtgaaaccctcattttc

SEQ ID NO: 725 - RNA, 23 nt, synthetic construct
  source 1..23: mol_type = other RNA
  modified_base 1: mod_base = OTHER; note = 2'-O-methyluridine-3'-phosphorothioate
  modified_base 2: mod_base = OTHER; note = 2'-deoxy-2'-fluoroguanosine-3'-phosphorothioate
  modified_base 3: mod_base = OTHER; note = 2'-O-methylcytidine-3'-phosphate
  modified_base 4: mod_base = OTHER; note = 2'-O-methyluridine-3'-phosphate
  modified_base 5: mod_base = OTHER; note = 2'-O-methyluridine-3'-phosphate
  modified_base 6: mod_base = OTHER; note = 2'-deoxy-2'-fluoroadenosine-3'-phosphate
  modified_base 7: mod_base = OTHER; note = 2'-O-methylcytidine-3'-phosphate
  modified_base 8: mod_base = OTHER; note = 2'-deoxy-2'-fluorocytidine-3'-phosphate
  modified_base 9: mod_base = OTHER; note = 2'-deoxy-2'-fluoroadenosine-3'-phosphate
  modified_base 10: mod_base = OTHER; note = 2'-O-methylguanosine-3'-phosphate
  modified_base 11: mod_base = OTHER; note = 2'-O-methylguanosine-3'-phosphate
  modified_base 12: mod_base = OTHER; note = 2'-O-methylguanosine-3'-phosphate
  modified_base 13: mod_base = OTHER; note = 2'-O-methyluridine-3'-phosphate
  modified_base 14: mod_base = OTHER; note = 2'-deoxy-2'-fluorocytidine-3'-phosphate
  modified_base 15: mod_base = OTHER; note = 2'-O-methylcytidine-3'-phosphate
  modified_base 16: mod_base = OTHER; note = 2'-deoxy-2'-fluorouridine-3'-phosphate
  modified_base 17: mod_base = OTHER; note = 2'-O-methylcytidine-3'-phosphate
  modified_base 18: mod_base = OTHER; note = 2'-O-methylcytidine-3'-phosphate
  modified_base 19: mod_base = OTHER; note = 2'-O-methylcytidine-3'-phosphate
  modified_base 20: mod_base = OTHER; note = 2'-O-methyladenosine-3'-phosphate
  modified_base 21: mod_base = OTHER; note = 2'-O-methylguanosine-3'-phosphorothioate
  modified_base 22: mod_base = OTHER; note = 2'-O-methylcytidine-3'-phosphorothioate
  modified_base 23: mod_base = OTHER; note = 2'-O-methylguanosine
tgcttaccagggtcctcccagcg

SEQ ID NO: 726 - RNA, 23 nt, synthetic construct
  source 1..23: mol_type = other RNA
  modified_base 1: mod_base = OTHER; note = 2'-O-methyluridine-3'-phosphorothioate
  modified_base 2: mod_base = OTHER; note = 2'-deoxy-2'-fluorocytidine-3'-phosphorothioate
  modified_base 3: mod_base = OTHER; note = 2'-O-methylguanosine-3'-phosphate
  modified_base 4: mod_base = OTHER; note = 2'-O-methyladenosine-3'-phosphate
  modified_base 5: mod_base = OTHER; note = 2'-O-methyladenosine-3'-phosphate
  modified_base 6: mod_base = OTHER; note = 2'-deoxy-2'-fluorocytidine-3'-phosphate
  modified_base 7: mod_base = OTHER; note = 2'-O-methyladenosine-3'-phosphate
  modified_base 8: mod_base = OTHER; note = 2'-deoxy-2'-fluoroadenosine-3'-phosphate
  modified_base 9: mod_base = OTHER; note = 2'-deoxy-2'-fluorocytidine-3'-phosphate
  modified_base 10: mod_base = OTHER; note = 2'-O-methyladenosine-3'-phosphate
  modified_base 11: mod_base = OTHER; note = 2'-O-methylguanosine-3'-phosphate
  modified_base 12: mod_base = OTHER; note = 2'-O-methyladenosine-3'-phosphate
  modified_base 13: mod_base = OTHER; note = 2'-O-methylguanosine-3'-phosphate
  modified_base 14: mod_base = OTHER; note = 2'-deoxy-2'-fluorouridine-3'-phosphate
  modified_base 15: mod_base = OTHER; note = 2'-O-methyladenosine-3'-phosphate
  modified_base 16: mod_base = OTHER; note = 2'-deoxy-2'-fluoroguanosine-3'-phosphate
  modified_base 17: mod_base = OTHER; note = 2'-O-methylguanosine-3'-phosphate
  modified_base 18: mod_base = OTHER; note = 2'-O-methylguanosine-3'-phosphate
  modified_base 19: mod_base = OTHER; note = 2'-O-methyluridine-3'-phosphate
  modified_base 20: mod_base = OTHER; note = 2'-O-methyladenosine-3'-phosphate
  modified_base 21: mod_base = OTHER; note = 2'-O-methylguanosine-3'-phosphorothioate
  modified_base 22: mod_base = OTHER; note = 2'-O-methylcytidine-3'-phosphorothioate
  modified_base 23: mod_base = OTHER; note = 2'-O-methylcytidine
tcgaacaacagagtagggtagcc

SEQ ID NO: 727 - RNA, 23 nt, synthetic construct
  source 1..23: mol_type = other RNA
  modified_base 1: mod_base = OTHER; note = 2'-O-methyluridine-3'-phosphorothioate
  modified_base 2: mod_base = OTHER; note = 2'-deoxy-2'-fluorouridine-3'-phosphorothioate
  modified_base 3: mod_base = OTHER; note = 2'-O-methyluridine-3'-phosphate
  modified_base 4: mod_base = OTHER; note = 2'-O-methylguanosine-3'-phosphate
  modified_base 5: mod_base = OTHER; note = 2'-O-methylguanosine-3'-phosphate
  modified_base 6: mod_base = OTHER; note = 2'-deoxy-2'-fluorocytidine-3'-phosphate
  modified_base 7: mod_base = OTHER; note = 2'-O-methylcytidine-3'-phosphate
  modified_base 8: mod_base = OTHER; note = 2'-deoxy-2'-fluorouridine-3'-phosphate
  modified_base 9: mod_base = OTHER; note = 2'-deoxy-2'-fluorouridine-3'-phosphate
  modified_base 10: mod_base = OTHER; note = 2'-O-methyladenosine-3'-phosphate
  modified_base 11: mod_base = OTHER; note = 2'-O-methylguanosine-3'-phosphate
  modified_base 12: mod_base = OTHER; note = 2'-O-methylcytidine-3'-phosphate
  modified_base 13: mod_base = OTHER; note = 2'-O-methyladenosine-3'-phosphate
  modified_base 14: mod_base = OTHER; note = 2'-deoxy-2'-fluorouridine-3'-phosphate
  modified_base 15: mod_base = OTHER; note = 2'-O-methylguanosine-3'-phosphate
  modified_base 16: mod_base = OTHER; note = 2'-deoxy-2'-fluoroguanosine-3'-phosphate
  modified_base 17: mod_base = OTHER; note = 2'-O-methyluridine-3'-phosphate
  modified_base 18: mod_base = OTHER; note = 2'-O-methyladenosine-3'-phosphate
  modified_base 19: mod_base = OTHER; note = 2'-O-methylcytidine-3'-phosphate
  modified_base 20: mod_base = OTHER; note = 2'-O-methyladenosine-3'-phosphate
  modified_base 21: mod_base = OTHER; note = 2'-O-methyluridine-3'-phosphorothioate
  modified_base 22: mod_base = OTHER; note = 2'-O-methyluridine-3'-phosphorothioate
  modified_base 23: mod_base = OTHER; note = 2'-O-methylguanosine
tttggccttagcatggtacattg

SEQ ID NO: 728 - RNA, 23 nt, synthetic construct
  source 1..23: mol_type = other RNA
  modified_base 1: mod_base = OTHER; note = 2'-O-methyluridine-3'-phosphorothioate
  modified_base 2: mod_base = OTHER; note = 2'-deoxy-2'-fluorouridine-3'-phosphorothioate
  modified_base 3: mod_base = OTHER; note = 2'-O-methyluridine-3'-phosphate
  modified_base 4: mod_base = OTHER; note = 2'-O-methylcytidine-3'-phosphate
  modified_base 5: mod_base = OTHER; note = 2'-O-methyluridine-3'-phosphate
  modified_base 6: mod_base = OTHER; note = 2'-deoxy-2'-fluorocytidine-3'-phosphate
  modified_base 7: mod_base = OTHER; note = 2'-O-methyladenosine-3'-phosphate
  modified_base 8: mod_base = OTHER; note = 2'-deoxy-2'-fluorocytidine-3'-phosphate
  modified_base 9: mod_base = OTHER; note = 2'-deoxy-2'-fluorouridine-3'-phosphate
  modified_base 10: mod_base = OTHER; note = 2'-O-methylguanosine-3'-phosphate
  modified_base 11: mod_base = OTHER; note = 2'-O-methylguanosine-3'-phosphate
  modified_base 12: mod_base = OTHER; note = 2'-O-methyladenosine-3'-phosphate
  modified_base 13: mod_base = OTHER; note = 2'-O-methylcytidine-3'-phosphate
  modified_base 14: mod_base = OTHER; note = 2'-deoxy-2'-fluoroadenosine-3'-phosphate
  modified_base 15: mod_base = OTHER; note = 2'-O-methylguanosine-3'-phosphate
  modified_base 16: mod_base = OTHER; note = 2'-deoxy-2'-fluorocytidine-3'-phosphate
  modified_base 17: mod_base = OTHER; note = 2'-O-methyladenosine-3'-phosphate
  modified_base 18: mod_base = OTHER; note = 2'-O-methylcytidine-3'-phosphate
  modified_base 19: mod_base = OTHER; note = 2'-O-methyluridine-3'-phosphate
  modified_base 20: mod_base = OTHER; note = 2'-O-methyladenosine-3'-phosphate
  modified_base 21: mod_base = OTHER; note = 2'-O-methylguanosine-3'-phosphorothioate
  modified_base 22: mod_base = OTHER; note = 2'-O-methyluridine-3'-phosphorothioate
  modified_base 23: mod_base = OTHER; note = 2'-O-methyluridine
tttctcactggacagcactagtt

SEQ ID NO: 729 - RNA, 23 nt, synthetic construct
  source 1..23: mol_type = other RNA
  modified_base 1: mod_base = OTHER; note = 2'-O-methyluridine-3'-phosphorothioate
  modified_base 2: mod_base = OTHER; note = 2'-deoxy-2'-fluoroadenosine-3'-phosphorothioate
  modified_base 3: mod_base = OTHER; note = 2'-O-methyluridine-3'-phosphate
  modified_base 4: mod_base = OTHER; note = 2'-O-methylcytidine-3'-phosphate
  modified_base 5: mod_base = OTHER; note = 2'-O-methyladenosine-3'-phosphate
  modified_base 6: mod_base = OTHER; note = 2'-deoxy-2'-fluoroadenosine-3'-phosphate
  modified_base 7: mod_base = OTHER; note = 2'-O-methylguanosine-3'-phosphate
  modified_base 8: mod_base = OTHER; note = 2'-deoxy-2'-fluoroguanosine-3'-phosphate
  modified_base 9: mod_base = OTHER; note = 2'-deoxy-2'-fluorouridine-3'-phosphate
  modified_base 10: mod_base = OTHER; note = 2'-O-methyluridine-3'-phosphate
  modified_base 11: mod_base = OTHER; note = 2'-O-methylcytidine-3'-phosphate
  modified_base 12: mod_base = OTHER; note = 2'-O-methyladenosine-3'-phosphate
  modified_base 13: mod_base = OTHER; note = 2'-O-methylguanosine-3'-phosphate
  modified_base 14: mod_base = OTHER; note = 2'-deoxy-2'-fluorouridine-3'-phosphate
  modified_base 15: mod_base = OTHER; note = 2'-O-methyluridine-3'-phosphate
  modified_base 16: mod_base = OTHER; note = 2'-deoxy-2'-fluorocytidine-3'-phosphate
  modified_base 17: mod_base = OTHER; note = 2'-O-methylcytidine-3'-phosphate
  modified_base 18: mod_base = OTHER; note = 2'-O-methyluridine-3'-phosphate
  modified_base 19: mod_base = OTHER; note = 2'-O-methylguanosine-3'-phosphate
  modified_base 20: mod_base = OTHER; note = 2'-O-methylguanosine-3'-phosphate
  modified_base 21: mod_base = OTHER; note = 2'-O-methyluridine-3'-phosphorothioate
  modified_base 22: mod_base = OTHER; note = 2'-O-methylguanosine-3'-phosphorothioate
  modified_base 23: mod_base = OTHER; note = 2'-O-methylguanosine
tatcaaggttcagttcctggtgg

SEQ ID NO: 730 - RNA, 23 nt, synthetic construct
  source 1..23: mol_type = other RNA
  modified_base 1: mod_base = OTHER; note = 2'-O-methyluridine-3'-phosphorothioate
  modified_base 2: mod_base = OTHER; note = 2'-deoxy-2'-fluorocytidine-3'-phosphorothioate
  modified_base 3: mod_base = OTHER; note = 2'-O-methylcytidine-3'-phosphate
  modified_base 4: mod_base = OTHER; note = 2'-O-methyladenosine-3'-phosphate
  modified_base 5: mod_base = OTHER; note = 2'-O-methylguanosine-3'-phosphate
  modified_base 6: mod_base = OTHER; note = 2'-deoxy-2'-fluoroguanosine-3'-phosphate
  modified_base 7: mod_base = OTHER; note = 2'-O-methyluridine-3'-phosphate
  modified_base 8: mod_base = OTHER; note = 2'-deoxy-2'-fluoroadenosine-3'-phosphate
  modified_base 9: mod_base = OTHER; note = 2'-deoxy-2'-fluoroguanosine-3'-phosphate
  modified_base 10: mod_base = OTHER; note = 2'-O-methyladenosine-3'-phosphate
  modified_base 11: mod_base = OTHER; note = 2'-O-methyluridine-3'-phosphate
  modified_base 12: mod_base = OTHER; note = 2'-O-methylguanosine-3'-phosphate
  modified_base 13: mod_base = OTHER; note = 2'-O-methyladenosine-3'-phosphate
  modified_base 14: mod_base = OTHER; note = 2'-deoxy-2'-fluorouridine-3'-phosphate
  modified_base 15: mod_base = OTHER; note = 2'-O-methylguanosine-3'-phosphate
  modified_base 16: mod_base = OTHER; note = 2'-deoxy-2'-fluoroadenosine-3'-phosphate
  modified_base 17: mod_base = OTHER; note = 2'-O-methylguanosine-3'-phosphate
  modified_base 18: mod_base = OTHER; note = 2'-O-methylguanosine-3'-phosphate
  modified_base 19: mod_base = OTHER; note = 2'-O-methylguanosine-3'-phosphate
  modified_base 20: mod_base = OTHER; note = 2'-O-methyluridine-3'-phosphate
  modified_base 21: mod_base = OTHER; note = 2'-O-methylguanosine-3'-phosphorothioate
  modified_base 22: mod_base = OTHER; note = 2'-O-methyluridine-3'-phosphorothioate
  modified_base 23: mod_base = OTHER; note = 2'-O-methyluridine
tccaggtagatgatgagggtgtt

SEQ ID NO: 731 - RNA, 23 nt, synthetic construct
  source 1..23: mol_type = other RNA
  modified_base 1: mod_base = OTHER; note = 2'-O-methyluridine-3'-phosphorothioate
  modified_base 2: mod_base = OTHER; note = 2'-deoxy-2'-fluoroguanosine-3'-phosphorothioate
  modified_base 3: mod_base = OTHER; note = 2'-O-methyladenosine-3'-phosphate
  modified_base 4: mod_base = OTHER; note = 2'-O-methyluridine-3'-phosphate
  modified_base 5: mod_base = OTHER; note = 2'-O-methylguanosine-3'-phosphate
  modified_base 6: mod_base = OTHER; note = 2'-deoxy-2'-fluoroadenosine-3'-phosphate
  modified_base 7: mod_base = OTHER; note = 2'-O-methyladenosine-3'-phosphate
  modified_base 8: mod_base = OTHER; note = 2'-deoxy-2'-fluoroguanosine-3'-phosphate
  modified_base 9: mod_base = OTHER; note = 2'-deoxy-2'-fluoroadenosine-3'-phosphate
  modified_base 10: mod_base = OTHER; note = 2'-O-methylguanosine-3'-phosphate
  modified_base 11: mod_base = OTHER; note = 2'-O-methylguanosine-3'-phosphate
  modified_base 12: mod_base = OTHER; note = 2'-O-methyluridine-3'-phosphate
  modified_base 13: mod_base = OTHER; note = 2'-O-methyladenosine-3'-phosphate
  modified_base 14: mod_base = OTHER; note = 2'-deoxy-2'-fluorocytidine-3'-phosphate
  modified_base 15: mod_base = OTHER; note = 2'-O-methylcytidine-3'-phosphate
  modified_base 16: mod_base = OTHER; note = 2'-deoxy-2'-fluorocytidine-3'-phosphate
  modified_base 17: mod_base = OTHER; note = 2'-O-methylguanosine-3'-phosphate
  modified_base 18: mod_base = OTHER; note = 2'-O-methylcytidine-3'-phosphate
  modified_base 19: mod_base = OTHER; note = 2'-O-methyluridine-3'-phosphate
  modified_base 20: mod_base = OTHER; note = 2'-O-methylcytidine-3'-phosphate
  modified_base 21: mod_base = OTHER; note = 2'-O-methyluridine-3'-phosphorothioate
  modified_base 22: mod_base = OTHER; note = 2'-O-methylguanosine-3'-phosphorothioate
  modified_base 23: mod_base = OTHER; note = 2'-O-methylcytidine
tgatgaagaggtacccgctctgc

SEQ ID NO: 732 - RNA, 23 nt, synthetic construct
  source 1..23: mol_type = other RNA
  modified_base 1: mod_base = OTHER; note = 2'-O-methyluridine-3'-phosphorothioate
  modified_base 2: mod_base = OTHER; note = 2'-deoxy-2'-fluoroguanosine-3'-phosphorothioate
  modified_base 3: mod_base = OTHER; note = 2'-O-methyladenosine-3'-phosphate
  modified_base 4: mod_base = OTHER; note = 2'-O-methyluridine-3'-phosphate
  modified_base 5: mod_base = OTHER; note = 2'-O-methylguanosine-3'-phosphate
  modified_base 6: mod_base = OTHER; note = 2'-deoxy-2'-fluoroadenosine-3'-phosphate
  modified_base 7: mod_base = OTHER; note = 2'-O-methyladenosine-3'-phosphate
  modified_base 8: mod_base = OTHER; note = 2'-deoxy-2'-fluoroguanosine-3'-phosphate
  modified_base 9: mod_base = OTHER; note = 2'-deoxy-2'-fluoroadenosine-3'-phosphate
  modified_base 10: mod_base = OTHER; note = 2'-O-methylguanosine-3'-phosphate
  modified_base 11: mod_base = OTHER; note = 2'-O-methylguanosine-3'-phosphate
  modified_base 12: mod_base = OTHER; note = 2'-O-methyluridine-3'-phosphate
  modified_base 13: mod_base = OTHER; note = 2'-O-methyladenosine-3'-phosphate
  modified_base 14: mod_base = OTHER; note = 2'-deoxy-2'-fluorocytidine-3'-phosphate
  modified_base 15: mod_base = OTHER; note = 2'-O-methylcytidine-3'-phosphate
  modified_base 16: mod_base = OTHER; note = 2'-deoxy-2'-fluorocytidine-3'-phosphate
  modified_base 17: mod_base = OTHER; note = 2'-O-methylguanosine-3'-phosphate
  modified_base 18: mod_base = OTHER; note = 2'-O-methylcytidine-3'-phosphate
  modified_base 19: mod_base = OTHER; note = 2'-O-methyluridine-3'-phosphate
  modified_base 20: mod_base = OTHER; note = 2'-O-methylcytidine-3'-phosphate
  modified_base 21: mod_base = OTHER; note = 2'-O-methyluridine-3'-phosphorothioate
  modified_base 22: mod_base = OTHER; note = 2'-O-methylguanosine-3'-phosphorothioate
  modified_base 23: mod_base = OTHER; note = 2'-O-methylcytidine
tgatgaagaggtacccgctctgc

SEQ ID NO: 733 - RNA, 23 nt, synthetic construct
  source 1..23: mol_type = other RNA
  modified_base 1: mod_base = OTHER; note = 2'-O-methyluridine-3'-phosphorothioate
  modified_base 2: mod_base = OTHER; note = 2'-deoxy-2'-fluoroguanosine-3'-phosphorothioate
  modified_base 3: mod_base = OTHER; note = 2'-O-methyladenosine-3'-phosphate
  modified_base 4: mod_base = OTHER; note = 2'-O-methyluridine-3'-phosphate
  modified_base 5: mod_base = OTHER; note = 2'-O-methylguanosine-3'-phosphate
  modified_base 6: mod_base = OTHER; note = 2'-deoxy-2'-fluoroadenosine-3'-phosphate
  modified_base 7: mod_base = OTHER; note = 2'-O-methyladenosine-3'-phosphate
  modified_base 8: mod_base = OTHER; note = 2'-deoxy-2'-fluoroguanosine-3'-phosphate
  modified_base 9: mod_base = OTHER; note = 2'-deoxy-2'-fluoroadenosine-3'-phosphate
  modified_base 10: mod_base = OTHER; note = 2'-O-methylguanosine-3'-phosphate
  modified_base 11: mod_base = OTHER; note = 2'-O-methylguanosine-3'-phosphate
  modified_base 12: mod_base = OTHER; note = 2'-O-methyluridine-3'-phosphate
  modified_base 13: mod_base = OTHER; note = 2'-O-methyladenosine-3'-phosphate
  modified_base 14: mod_base = OTHER; note = 2'-deoxy-2'-fluorocytidine-3'-phosphate
  modified_base 15: mod_base = OTHER; note = 2'-O-methylcytidine-3'-phosphate
  modified_base 16: mod_base = OTHER; note = 2'-deoxy-2'-fluorocytidine-3'-phosphate
  modified_base 17: mod_base = OTHER; note = 2'-O-methylguanosine-3'-phosphate
  modified_base 18: mod_base = OTHER; note = 2'-O-methylcytidine-3'-phosphate
  modified_base 19: mod_base = OTHER; note = 2'-O-methyluridine-3'-phosphate
  modified_base 20: mod_base = OTHER; note = 2'-O-methylcytidine-3'-phosphate
  modified_base 21: mod_base = OTHER; note = 2'-O-methyluridine-3'-phosphorothioate
  modified_base 22: mod_base = OTHER; note = 2'-O-methylguanosine-3'-phosphorothioate
  modified_base 23: mod_base = OTHER; note = 2'-O-methylcytidine
tgatgaagaggtacccgctctgc

SEQ ID NO: 734 - RNA, 23 nt, synthetic construct
  source 1..23: mol_type = other RNA
  modified_base 1: mod_base = OTHER; note = 2'-O-methyluridine-3'-phosphorothioate
  modified_base 2: mod_base = OTHER; note = 2'-deoxy-2'-fluorouridine-3'-phosphorothioate
  modified_base 3: mod_base = OTHER; note = 2'-O-methylcytidine-3'-phosphate
  modified_base 4: mod_base = OTHER; note = 2'-O-methylcytidine-3'-phosphate
  modified_base 5: mod_base = OTHER; note = 2'-O-methylguanosine-3'-phosphate
  modified_base 6: mod_base = OTHER; note = 2'-deoxy-2'-fluoroguanosine-3'-phosphate
  modified_base 7: mod_base = OTHER; note = 2'-O-methylcytidine-3'-phosphate
  modified_base 8: mod_base = OTHER; note = 2'-deoxy-2'-fluorouridine-3'-phosphate
  modified_base 9: mod_base = OTHER; note = 2'-deoxy-2'-fluorocytidine-3'-phosphate
  modified_base 10: mod_base = OTHER; note = 2'-O-methyladenosine-3'-phosphate
  modified_base 11: mod_base = OTHER; note = 2'-O-methylguanosine-3'-phosphate
  modified_base 12: mod_base = OTHER; note = 2'-O-methylcytidine-3'-phosphate
  modified_base 13: mod_base = OTHER; note = 2'-O-methyladenosine-3'-phosphate
  modified_base 14: mod_base = OTHER; note = 2'-deoxy-2'-fluorocytidine-3'-phosphate
  modified_base 15: mod_base = OTHER; note = 2'-O-methyladenosine-3'-phosphate
  modified_base 16: mod_base = OTHER; note = 2'-deoxy-2'-fluoroadenosine-3'-phosphate
  modified_base 17: mod_base = OTHER; note = 2'-O-methylcytidine-3'-phosphate
  modified_base 18: mod_base = OTHER; note = 2'-O-methylcytidine-3'-phosphate
  modified_base 19: mod_base = OTHER; note = 2'-O-methyluridine-3'-phosphate
  modified_base 20: mod_base = OTHER; note = 2'-O-methylcytidine-3'-phosphate
  modified_base 21: mod_base = OTHER; note = 2'-O-methylcytidine-3'-phosphorothioate
  modified_base 22: mod_base = OTHER; note = 2'-O-methylcytidine-3'-phosphorothioate
  modified_base 23: mod_base = OTHER; note = 2'-O-methylcytidine
ttccggctcagcacaacctcccc

SEQ ID NO: 735 - RNA, 23 nt, synthetic construct
  source 1..23: mol_type = other RNA
  modified_base 1: mod_base = OTHER; note = 2'-O-methyluridine-3'-phosphorothioate
  modified_base 2: mod_base = OTHER; note = 2'-deoxy-2'-fluoroguanosine-3'-phosphorothioate
  modified_base 3: mod_base = OTHER; note = 2'-O-methyladenosine-3'-phosphate
  modified_base 4: mod_base = OTHER; note = 2'-O-methyluridine-3'-phosphate
  modified_base 5: mod_base = OTHER; note = 2'-O-methylcytidine-3'-phosphate
  modified_base 6: mod_base = OTHER; note = 2'-deoxy-2'-fluorouridine-3'-phosphate
  modified_base 7: mod_base = OTHER; note = 2'-O-methyluridine-3'-phosphate
  modified_base 8: mod_base = OTHER; note = 2'-deoxy-2'-fluorocytidine-3'-phosphate
  modified_base 9: mod_base = OTHER; note = 2'-deoxy-2'-fluorocytidine-3'-phosphate
  modified_base 10: mod_base = OTHER; note = 2'-O-methyladenosine-3'-phosphate
  modified_base 11: mod_base = OTHER; note = 2'-O-methylcytidine-3'-phosphate
  modified_base 12: mod_base = OTHER; note = 2'-O-methyluridine-3'-phosphate
  modified_base 13: mod_base = OTHER; note = 2'-O-methylguanosine-3'-phosphate
  modified_base 14: mod_base = OTHER; note = 2'-deoxy-2'-fluoroguanosine-3'-phosphate
  modified_base 15: mod_base = OTHER; note = 2'-O-methylcytidine-3'-phosphate
  modified_base 16: mod_base = OTHER; note = 2'-deoxy-2'-fluorocytidine-3'-phosphate
  modified_base 17: mod_base = OTHER; note = 2'-O-methylcytidine-3'-phosphate
  modified_base 18: mod_base = OTHER; note = 2'-O-methyladenosine-3'-phosphate
  modified_base 19: mod_base = OTHER; note = 2'-O-methyluridine-3'-phosphate
  modified_base 20: mod_base = OTHER; note = 2'-O-methylguanosine-3'-phosphate
  modified_base 21: mod_base = OTHER; note = 2'-O-methyluridine-3'-phosphorothioate
  modified_base 22: mod_base = OTHER; note = 2'-O-methyluridine-3'-phosphorothioate
  modified_base 23: mod_base = OTHER; note = 2'-O-methylguanosine
tgatcttccactggcccatgttg

SEQ ID NO: 736 - RNA, 23 nt, synthetic construct
  source 1..23: mol_type = other RNA
  modified_base 1: mod_base = OTHER; note = 2'-O-methyluridine-3'-phosphorothioate
  modified_base 2: mod_base = OTHER; note = 2'-deoxy-2'-fluorocytidine-3'-phosphorothioate
  modified_base 3: mod_base = OTHER; note = 2'-O-methyluridine-3'-phosphate
  modified_base 4: mod_base = OTHER; note = 2'-O-methyladenosine-3'-phosphate
  modified_base 5: mod_base = OTHER; note = 2'-O-methylguanosine-3'-phosphate
  modified_base 6: mod_base = OTHER; note = 2'-deoxy-2'-fluoroguanosine-3'-phosphate
  modified_base 7: mod_base = OTHER; note = 2'-O-methylcytidine-3'-phosphate
  modified_base 8: mod_base = OTHER; note = 2'-deoxy-2'-fluorocytidine-3'-phosphate
  modified_base 9: mod_base = OTHER; note = 2'-deoxy-2'-fluoroguanosine-3'-phosphate
  modified_base 10: mod_base = OTHER; note = 2'-O-methyladenosine-3'-phosphate
  modified_base 11: mod_base = OTHER; note = 2'-O-methyladenosine-3'-phosphate
  modified_base 12: mod_base = OTHER; note = 2'-O-methylcytidine-3'-phosphate
  modified_base 13: mod_base = OTHER; note = 2'-O-methyluridine-3'-phosphate
  modified_base 14: mod_base = OTHER; note = 2'-deoxy-2'-fluorouridine-3'-phosphate
  modified_base 15: mod_base = OTHER; note = 2'-O-methylcytidine-3'-phosphate
  modified_base 16: mod_base = OTHER; note = 2'-deoxy-2'-fluorouridine-3'-phosphate
  modified_base 17: mod_base = OTHER; note = 2'-O-methylcytidine-3'-phosphate
  modified_base 18: mod_base = OTHER; note = 2'-O-methylcytidine-3'-phosphate
  modified_base 19: mod_base = OTHER; note = 2'-O-methylcytidine-3'-phosphate
  modified_base 20: mod_base = OTHER; note = 2'-O-methyladenosine-3'-phosphate
  modified_base 21: mod_base = OTHER; note = 2'-O-methylcytidine-3'-phosphorothioate
  modified_base 22: mod_base = OTHER; note = 2'-O-methyluridine-3'-phosphorothioate
  modified_base 23: mod_base = OTHER; note = 2'-O-methylguanosine
tctaggccgaacttctcccactg

SEQ ID NO: 737 - RNA, 23 nt, synthetic construct
  source 1..23: mol_type = other RNA
  modified_base 1: mod_base = OTHER; note = 2'-O-methyluridine-3'-phosphorothioate
  modified_base 2: mod_base = OTHER; note = 2'-deoxy-2'-fluorocytidine-3'-phosphorothioate
  modified_base 3: mod_base = OTHER; note = 2'-O-methyluridine-3'-phosphate
  modified_base 4: mod_base = OTHER; note = 2'-O-methylguanosine-3'-phosphate
  modified_base 5: mod_base = OTHER; note = 2'-O-methylguanosine-3'-phosphate
  modified_base 6: mod_base = OTHER; note = 2'-deoxy-2'-fluorouridine-3'-phosphate
  modified_base 7: mod_base = OTHER; note = 2'-O-methyluridine-3'-phosphate
  modified_base 8: mod_base = OTHER; note = 2'-deoxy-2'-fluorocytidine-3'-phosphate
  modified_base 9: mod_base = OTHER; note = 2'-deoxy-2'-fluorouridine-3'-phosphate
  modified_base 10: mod_base = OTHER; note = 2'-O-methylguanosine-3'-phosphate
  modified_base 11: mod_base = OTHER; note = 2'-O-methyladenosine-3'-phosphate
  modified_base 12: mod_base = OTHER; note = 2'-O-methylguanosine-3'-phosphate
  modified_base 13: mod_base = OTHER; note = 2'-O-methyladenosine-3'-phosphate
  modified_base 14: mod_base = OTHER; note = 2'-deoxy-2'-fluoroadenosine-3'-phosphate
  modified_base 15: mod_base = OTHER; note = 2'-O-methylguanosine-3'-phosphate
  modified_base 16: mod_base = OTHER; note = 2'-deoxy-2'-fluoroadenosine-3'-phosphate
  modified_base 17: mod_base = OTHER; note = 2'-O-methylcytidine-3'-phosphate
  modified_base 18: mod_base = OTHER; note = 2'-O-methyladenosine-3'-phosphate
  modified_base 19: mod_base = OTHER; note = 2'-O-methyladenosine-3'-phosphate
  modified_base 20: mod_base = OTHER; note = 2'-O-methylguanosine-3'-phosphate
  modified_base 21: mod_base = OTHER; note = 2'-O-methylguanosine-3'-phosphorothioate
  modified_base 22: mod_base = OTHER; note = 2'-O-methyladenosine-3'-phosphorothioate
  modified_base 23: mod_base = OTHER; note = 2'-O-methylguanosine
tctggttctgagaagacaaggag

SEQ ID NO: 738 - RNA, 23 nt, synthetic construct
  source 1..23: mol_type = other RNA
  modified_base 1: mod_base = OTHER; note = 2'-O-methyluridine-3'-phosphorothioate
  modified_base 2: mod_base = OTHER; note = 2'-deoxy-2'-fluoroguanosine-3'-phosphorothioate
  modified_base 3: mod_base = OTHER; note = 2'-O-methyladenosine-3'-phosphate
  modified_base 4: mod_base = OTHER; note = 2'-O-methylcytidine-3'-phosphate
  modified_base 5: mod_base = OTHER; note = 2'-O-methylcytidine-3'-phosphate
  modified_base 6: mod_base = OTHER; note = 2'-deoxy-2'-fluoroadenosine-3'-phosphate
  modified_base 7: mod_base = OTHER; note = 2'-O-methylguanosine-3'-phosphate
  modified_base 8: mod_base = OTHER; note = 2'-deoxy-2'-fluorouridine-3'-phosphate
  modified_base 9: mod_base = OTHER; note = 2'-deoxy-2'-fluorocytidine-3'-phosphate
  modified_base 10: mod_base = OTHER; note = 2'-O-methylguanosine-3'-phosphate
  modified_base 11: mod_base = OTHER; note = 2'-O-methylguanosine-3'-phosphate
  modified_base 12: mod_base = OTHER; note = 2'-O-methylguanosine-3'-phosphate
  modified_base 13: mod_base = OTHER; note = 2'-O-methyluridine-3'-phosphate
  modified_base 14: mod_base = OTHER; note = 2'-deoxy-2'-fluorocytidine-3'-phosphate
  modified_base 15: mod_base = OTHER; note = 2'-O-methyluridine-3'-phosphate
  modified_base 16: mod_base = OTHER; note = 2'-deoxy-2'-fluorouridine-3'-phosphate
  modified_base 17: mod_base = OTHER; note = 2'-O-methylguanosine-3'-phosphate
  modified_base 18: mod_base = OTHER; note = 2'-O-methyluridine-3'-phosphate
  modified_base 19: mod_base = OTHER; note = 2'-O-methyladenosine-3'-phosphate
  modified_base 20: mod_base = OTHER; note = 2'-O-methylcytidine-3'-phosphate
  modified_base 21: mod_base = OTHER; note = 2'-O-methyladenosine-3'-phosphorothioate
  modified_base 22: mod_base = OTHER; note = 2'-O-methylcytidine-3'-phosphorothioate
  modified_base 23: mod_base = OTHER; note = 2'-O-methyladenosine
tgaccagtcgggtcttgtacaca

SEQ ID NO: 739 - RNA, 23 nt, synthetic construct
  source 1..23: mol_type = other RNA
  modified_base 1: mod_base = OTHER; note = 2'-O-methyluridine-3'-phosphorothioate
  modified_base 2: mod_base = OTHER; note = 2'-deoxy-2'-fluorouridine-3'-phosphorothioate
  modified_base 3: mod_base = OTHER; note = 2'-O-methylcytidine-3'-phosphate
  modified_base 4: mod_base = OTHER; note = 2'-O-methylguanosine-3'-phosphate
  modified_base 5: mod_base = OTHER; note = 2'-O-methyladenosine-3'-phosphate
  modified_base 6: mod_base = OTHER; note = 2'-deoxy-2'-fluoroadenosine-3'-phosphate
  modified_base 7: mod_base = OTHER; note = 2'-O-methyladenosine-3'-phosphate
  modified_base 8: mod_base = OTHER; note = 2'-deoxy-2'-fluorocytidine-3'-phosphate
  modified_base 9: mod_base = OTHER; note = 2'-deoxy-2'-fluorouridine-3'-phosphate
  modified_base 10: mod_base = OTHER; note = 2'-O-methylguanosine-3'-phosphate
  modified_base 11: mod_base = OTHER; note = 2'-O-methylguanosine-3'-phosphate
  modified_base 12: mod_base = OTHER; note = 2'-O-methylguanosine-3'-phosphate
  modified_base 13: mod_base = OTHER; note = 2'-O-methylcytidine-3'-phosphate
  modified_base 14: mod_base = OTHER; note = 2'-deoxy-2'-fluoroadenosine-3'-phosphate
  modified_base 15: mod_base = OTHER; note = 2'-O-methylguanosine-3'-phosphate
  modified_base 16: mod_base = OTHER; note = 2'-deoxy-2'-fluorocytidine-3'-phosphate
  modified_base 17: mod_base = OTHER; note = 2'-O-methyladenosine-3'-phosphate
  modified_base 18: mod_base = OTHER; note = 2'-O-methylcytidine-3'-phosphate
  modified_base 19: mod_base = OTHER; note = 2'-O-methylguanosine-3'-phosphate
  modified_base 20: mod_base = OTHER; note = 2'-O-methyluridine-3'-phosphate
  modified_base 21: mod_base = OTHER; note = 2'-O-methyladenosine-3'-phosphorothioate
  modified_base 22: mod_base = OTHER; note = 2'-O-methylcytidine-3'-phosphorothioate
  modified_base 23: mod_base = OTHER; note = 2'-O-methyluridine
ttcgaaactgggcagcacgtact

SEQ ID NO: 740 - RNA, 23 nt, synthetic construct
  source 1..23: mol_type = other RNA
  modified_base 1: mod_base = OTHER; note = 2'-O-methyluridine-3'-phosphorothioate
  modified_base 2: mod_base = OTHER; note = 2'-deoxy-2'-fluoroadenosine-3'-phosphorothioate
  modified_base 3: mod_base = OTHER; note = 2'-O-methylguanosine-3'-phosphate
  modified_base 4: mod_base = OTHER; note = 2'-O-methyladenosine-3'-phosphate
  modified_base 5: mod_base = OTHER; note = 2'-O-methylcytidine-3'-phosphate
  modified_base 6: mod_base = OTHER; note = 2'-deoxy-2'-fluoroadenosine-3'-phosphate
  modified_base 7: mod_base = OTHER; note = 2'-O-methyluridine-3'-phosphate
  modified_base 8: mod_base = OTHER; note = 2'-deoxy-2'-fluoroadenosine-3'-phosphate
  modified_base 9: mod_base = OTHER; note = 2'-deoxy-2'-fluoroguanosine-3'-phosphate
  modified_base 10: mod_base = OTHER; note = 2'-O-methyluridine-3'-phosphate
  modified_base 11: mod_base = OTHER; note = 2'-O-methylguanosine-3'-phosphate
  modified_base 12: mod_base = OTHER; note = 2'-O-methylguanosine-3'-phosphate
  modified_base 13: mod_base = OTHER; note = 2'-O-methylcytidine-3'-phosphate
  modified_base 14: mod_base = OTHER; note = 2'-deoxy-2'-fluoroadenosine-3'-phosphate
  modified_base 15: mod_base = OTHER; note = 2'-O-methyluridine-3'-phosphate
  modified_base 16: mod_base = OTHER; note = 2'-deoxy-2'-fluorocytidine-3'-phosphate
  modified_base 17: mod_base = OTHER; note = 2'-O-methylcytidine-3'-phosphate
  modified_base 18: mod_base = OTHER; note = 2'-O-methyluridine-3'-phosphate
  modified_base 19: mod_base = OTHER; note = 2'-O-methylguanosine-3'-phosphate
  modified_base 20: mod_base = OTHER; note = 2'-O-methylguanosine-3'-phosphate
  modified_base 21: mod_base = OTHER; note = 2'-O-methyluridine-3'-phosphorothioate
  modified_base 22: mod_base = OTHER; note = 2'-O-methylcytidine-3'-phosphorothioate
  modified_base 23: mod_base = OTHER; note = 2'-O-methyluridine
tagacatagtggcatcctggtct

SEQ ID NO: 741 - DNA, 23 bp, synthetic construct
  source 1..23: mol_type = other DNA
  modified_base 1: mod_base = OTHER; note = 2'-O-methyladenosine-3'-phosphorothioate
  modified_base 2: mod_base = OTHER; note = 2'-deoxythymidine-3'-phosphorothioate
  modified_base 3: mod_base = OTHER; note = 2'-O-methyluridine-3'-phosphate
  modified_base 4: mod_base = OTHER; note = 2'-O-methylcytidine-3'-phosphate
  modified_base 6: mod_base = OTHER; note = 2'-O-methyluridine-3'-phosphate
  modified_base 8: mod_base = OTHER; note = 2'-O-methyluridine-3'-phosphate
  modified_base 9: mod_base = OTHER; note = 2'-O-methyluridine-3'-phosphate
  modified_base 10: mod_base = OTHER; note = 2'-O-methyladenosine-3'-phosphate
  modified_base 11: mod_base = OTHER; note = 2'-O-methyluridine-3'-phosphate
  modified_base 13: mod_base = OTHER; note = 2'-O-methylcytidine-3'-phosphate
  modified_base 14: mod_base = OTHER; note = 2'-deoxy-2'-fluoroadenosine-3'-phosphate
  modified_base 15: mod_base = OTHER; note = 2'-O-methylguanosine-3'-phosphate
  modified_base 16: mod_base = OTHER; note = 2'-O-methylcytidine-3'-phosphate
  modified_base 17: mod_base = OTHER; note = 2'-O-methyladenosine-3'-phosphate
  modified_base 18: mod_base = OTHER; note = 2'-O-methylcytidine-3'-phosphate
  modified_base 19: mod_base = OTHER; note = 2'-O-methylguanosine-3'-phosphate
  modified_base 20: mod_base = OTHER; note = 2'-O-methyladenosine-3'-phosphate
  modified_base 21: mod_base = OTHER; note = 2'-O-methyladenosine-3'-phosphorothioate
  modified_base 22: mod_base = OTHER; note = 2'-O-methylcytidine-3'-phosphorothioate
  modified_base 23: mod_base = OTHER; note = 2'-O-methyladenosine
  misc_feature 1: note = RNA
  misc_feature 3..4: note = RNA
  misc_feature 6: note = RNA
  misc_feature 8..11: note = RNA
  misc_feature 13..23: note = RNA
  misc_feature 2: note = DNA
  misc_feature 5: note = DNA
  misc_feature 7: note = DNA
  misc_feature 12: note = DNA
attcttcttattcagcacgaaca

SEQ ID NO: 742 - DNA, 23 bp, synthetic construct
  source 1..23: mol_type = other DNA
  modified_base 1: mod_base = OTHER; note = 2'-O-methyladenosine-3'-phosphorothioate
  modified_base 2: mod_base = OTHER; note = 2'-deoxyguanosine-3'-phosphorothioate
  modified_base 3: mod_base = OTHER; note = 2'-O-methyladenosine-3'-phosphate
  modified_base 4: mod_base = OTHER; note = 2'-O-methyluridine-3'-phosphate
  modified_base 6: mod_base = OTHER; note = 2'-O-methyluridine-3'-phosphate
  modified_base 8: mod_base = OTHER; note = 2'-O-methylguanosine-3'-phosphate
  modified_base 9: mod_base = OTHER; note = 2'-O-methyluridine-3'-phosphate
  modified_base 10: mod_base = OTHER; note = 2'-O-methyladenosine-3'-phosphate
  modified_base 11: mod_base = OTHER; note = 2'-O-methylguanosine-3'-phosphate
  modified_base 13: mod_base = OTHER; note = 2'-O-methyladenosine-3'-phosphate
  modified_base 14: mod_base = OTHER; note = 2'-deoxy-2'-fluorouridine-3'-phosphate
  modified_base 15: mod_base = OTHER; note = 2'-O-methyluridine-3'-phosphate
  modified_base 16: mod_base = OTHER; note = 2'-O-methyluridine-3'-phosphate
  modified_base 17: mod_base = OTHER; note = 2'-O-methylcytidine-3'-phosphate
  modified_base 18: mod_base = OTHER; note = 2'-O-methyluridine-3'-phosphate
  modified_base 19: mod_base = OTHER; note = 2'-O-methylcytidine-3'-phosphate
  modified_base 20: mod_base = OTHER; note = 2'-O-methyluridine-3'-phosphate
  modified_base 21: mod_base = OTHER; note = 2'-O-methylguanosine-3'-phosphorothioate
  modified_base 22: mod_base = OTHER; note = 2'-O-methyluridine-3'-phosphorothioate
  modified_base 23: mod_base = OTHER; note = 2'-O-methyladenosine
  misc_feature 1: note = RNA
  misc_feature 3..4: note = RNA
  misc_feature 6: note = RNA
  misc_feature 8..11: note = RNA
  misc_feature 13..23: note = RNA
  misc_feature 2: note = DNA
  misc_feature 5: note = DNA
  misc_feature 7: note = DNA
  misc_feature 12: note = DNA
agatgtagtagaatttctctgta

SEQ ID NO: 743 - DNA, 23 bp, synthetic construct
  source 1..23: mol_type = other DNA
  modified_base 1: mod_base = OTHER; note = 2'-O-methyladenosine-3'-phosphorothioate
  modified_base 2: mod_base = OTHER; note = 2'-deoxyadenosine-3'-phosphorothioate
  modified_base 3: mod_base = OTHER; note = 2'-O-methyladenosine-3'-phosphate
  modified_base 4: mod_base = OTHER; note = 2'-O-methylguanosine-3'-phosphate
  modified_base 6: mod_base = OTHER; note = 2'-O-methylcytidine-3'-phosphate
  modified_base 8: mod_base = OTHER; note = 2'-O-methyluridine-3'-phosphate
  modified_base 9: mod_base = OTHER; note = 2'-O-methyluridine-3'-phosphate
  modified_base 10: mod_base = OTHER; note = 2'-O-methyluridine-3'-phosphate
  modified_base 11: mod_base = OTHER; note = 2'-O-methyladenosine-3'-phosphate
  modified_base 13: mod_base = OTHER; note = 2'-O-methylcytidine-3'-phosphate
  modified_base 14: mod_base = OTHER; note = 2'-deoxy-2'-fluorouridine-3'-phosphate
  modified_base 15: mod_base = OTHER; note = 2'-O-methylguanosine-3'-phosphate
  modified_base 16: mod_base = OTHER; note = 2'-O-methylcytidine-3'-phosphate
  modified_base 17: mod_base = OTHER; note = 2'-O-methyladenosine-3'-phosphate
  modified_base 18: mod_base = OTHER; note = 2'-O-methylguanosine-3'-phosphate
  modified_base 19: mod_base = OTHER; note = 2'-O-methyluridine-3'-phosphate
  modified_base 20: mod_base = OTHER; note = 2'-O-methyladenosine-3'-phosphate
  modified_base 21: mod_base = OTHER; note = 2'-O-methylguanosine-3'-phosphorothioate
  modified_base 22: mod_base = OTHER; note = 2'-O-methylguanosine-3'-phosphorothioate
  modified_base 23: mod_base = OTHER; note = 2'-O-methylguanosine
  misc_feature 1: note = RNA
  misc_feature 3..4: note = RNA
  misc_feature 6: note = RNA
  misc_feature 8..11: note = RNA
  misc_feature 13..23: note = RNA
  misc_feature 2: note = DNA
  misc_feature 5: note = DNA
  misc_feature 7: note = DNA
  misc_feature 12: note = DNA
aaagtcttttagctgcagtaggg

SEQ ID NO: 744 - DNA, 23 bp, synthetic construct
  source 1..23: mol_type = other DNA
  modified_base 1: mod_base = OTHER; note = 2'-O-methyladenosine-3'-phosphorothioate
  modified_base 2: mod_base = OTHER; note = 2'-deoxythymidine-3'-phosphorothioate
  modified_base 3: mod_base = OTHER; note = 2'-O-methylguanosine-3'-phosphate
  modified_base 4: mod_base = OTHER; note = 2'-O-methylguanosine-3'-phosphate
  modified_base 6: mod_base = OTHER; note = 2'-O-methyladenosine-3'-phosphate
  modified_base 8: mod_base = OTHER; note = 2'-O-methyluridine-3'-phosphate
  modified_base 9: mod_base = OTHER; note = 2'-O-methylguanosine-3'-phosphate
  modified_base 10: mod_base = OTHER; note = 2'-O-methyluridine-3'-phosphate
  modified_base 11: mod_base = OTHER; note = 2'-O-methyluridine-3'-phosphate
  modified_base 13: mod_base = OTHER; note = 2'-O-methylcytidine-3'-phosphate
  modified_base 14: mod_base = OTHER; note = 2'-deoxy-2'-fluorouridine-3'-phosphate
  modified_base 15: mod_base = OTHER; note = 2'-O-methylguanosine-3'-phosphate
  modified_base 16: mod_base = OTHER; note = 2'-O-methylguanosine-3'-phosphate
  modified_base 17: mod_base = OTHER; note = 2'-O-methyluridine-3'-phosphate
  modified_base 18: mod_base = OTHER; note = 2'-O-methyluridine-3'-phosphate
  modified_base 19: mod_base = OTHER; note = 2'-O-methylcytidine-3'-phosphate
  modified_base 20: mod_base = OTHER; note = 2'-O-methyluridine-3'-phosphate
  modified_base 21: mod_base = OTHER; note = 2'-O-methylcytidine-3'-phosphorothioate
  modified_base 22: mod_base = OTHER; note = 2'-O-methyluridine-3'-phosphorothioate
  modified_base 23: mod_base = OTHER; note = 2'-O-methyluridine
  misc_feature 1: note = RNA
  misc_feature 3..4: note = RNA
  misc_feature 6: note = RNA
  misc_feature 8..11: note = RNA
  misc_feature 13..23: note = RNA
  misc_feature 2: note = DNA
  misc_feature 5: note = DNA
  misc_feature 7: note = DNA
  misc_feature 12: note = DNA
atggcattgtttctggttctctt

SEQ ID NO: 745 - DNA, 23 bp, synthetic construct
  source 1..23: mol_type = other DNA
  modified_base 1: mod_base = OTHER; note = 2'-O-methyluridine-3'-phosphorothioate
  modified_base 2: mod_base = OTHER; note = 2'-deoxythymidine-3'-phosphorothioate
  modified_base 3: mod_base = OTHER; note = 2'-O-methyluridine-3'-phosphate
  modified_base 4: mod_base = OTHER; note = 2'-O-methylguanosine-3'-phosphate
  modified_base 6: mod_base = OTHER; note = 2'-O-methylcytidine-3'-phosphate
  modified_base 8: mod_base = OTHER; note = 2'-O-methyluridine-3'-phosphate
  modified_base 9: mod_base = OTHER; note = 2'-O-methyluridine-3'-phosphate
  modified_base 10: mod_base = OTHER; note = 2'-O-methyladenosine-3'-phosphate
  modified_base 11: mod_base = OTHER; note = 2'-O-methylguanosine-3'-phosphate
  modified_base 13: mod_base = OTHER; note = 2'-O-methyladenosine-3'-phosphate
  modified_base 14: mod_base = OTHER; note = 2'-deoxy-2'-fluorouridine-3'-phosphate
  modified_base 15: mod_base = OTHER; note = 2'-O-methylguanosine-3'-phosphate
  modified_base 16: mod_base = OTHER; note = 2'-O-methylguanosine-3'-phosphate
  modified_base 17: mod_base = OTHER; note = 2'-O-methyluridine-3'-phosphate
  modified_base 18: mod_base = OTHER; note = 2'-O-methyladenosine-3'-phosphate
  modified_base 19: mod_base = OTHER; note = 2'-O-methylcytidine-3'-phosphate
  modified_base 20: mod_base = OTHER; note = 2'-O-methyladenosine-3'-phosphate
  modified_base 21: mod_base = OTHER; note = 2'-O-methyluridine-3'-phosphorothioate
  modified_base 22: mod_base = OTHER; note = 2'-O-methyluridine-3'-phosphorothioate
  modified_base 23: mod_base = OTHER; note = 2'-O-methylguanosine
  misc_feature 1: note = RNA
  misc_feature 3..4: note = RNA
  misc_feature 6: note = RNA
  misc_feature 8..11: note = RNA
  misc_feature 13..23: note = RNA
  misc_feature 2: note = DNA
  misc_feature 5: note = DNA
  misc_feature 7: note = DNA
  misc_feature 12: note = DNA
tttggccttagcatggtacattg

SEQ ID NO: 746 - DNA, 23 bp, synthetic construct
  source 1..23: mol_type = other DNA
  modified_base 1: mod_base = OTHER; note = 2'-O-methyladenosine-3'-phosphorothioate
  modified_base 2: mod_base = OTHER; note = 2'-deoxythymidine-3'-phosphorothioate
  modified_base 3: mod_base = OTHER; note = 2'-O-methyluridine-3'-phosphate
  modified_base 4: mod_base = OTHER; note = 2'-O-methylguanosine-3'-phosphate
  modified_base 6: mod_base = OTHER; note = 2'-O-methylguanosine-3'-phosphate
  modified_base 8: mod_base = OTHER; note = 2'-O-methylcytidine-3'-phosphate
  modified_base 9: mod_base = OTHER; note = 2'-O-methyladenosine-3'-phosphate
  modified_base 10: mod_base = OTHER; note = 2'-O-methyladenosine-3'-phosphate
  modified_base 11: mod_base = OTHER; note = 2'-O-methylcytidine-3'-phosphate
  modified_base 13: mod_base = OTHER; note = 2'-O-methylcytidine-3'-phosphate
  modified_base 14: mod_base = OTHER; note = 2'-deoxy-2'-fluoroadenosine-3'-phosphate
  modified_base 15: mod_base = OTHER; note = 2'-O-methylcytidine-3'-phosphate
  modified_base 16: mod_base = OTHER; note = 2'-O-methylguanosine-3'-phosphate
  modified_base 17: mod_base = OTHER; note = 2'-O-methyladenosine-3'-phosphate
  modified_base 18: mod_base = OTHER; note = 2'-O-methylcytidine-3'-phosphate
  modified_base 19: mod_base = OTHER; note = 2'-O-methylguanosine-3'-phosphate
  modified_base 20: mod_base = OTHER; note = 2'-O-methylguanosine-3'-phosphate
  modified_base 21: mod_base = OTHER; note = 2'-O-methylguanosine-3'-phosphorothioate
  modified_base 22: mod_base = OTHER; note = 2'-O-methyladenosine-3'-phosphorothioate
  modified_base 23: mod_base = OTHER; note = 2'-O-methylguanosine
  misc_feature 1: note = RNA
  misc_feature 3..4: note = RNA
  misc_feature 6: note = RNA
  misc_feature 8..11: note = RNA
  misc_feature 13..23: note = RNA
  misc_feature 2: note = DNA
  misc_feature 5: note = DNA
  misc_feature 7: note = DNA
  misc_feature 12: note = DNA
attgagccaacgcacgacgggag

SEQ ID NO: 747 - DNA, 23 bp, synthetic construct
  source 1..23: mol_type = other DNA
  modified_base 1: mod_base = OTHER; note = 2'-O-methyluridine-3'-phosphorothioate
  modified_base 2: mod_base = OTHER; note = 2'-deoxythymidine-3'-phosphorothioate
  modified_base 3: mod_base = OTHER; note = 2'-O-methyluridine-3'-phosphate
  modified_base 4: mod_base = OTHER; note = 2'-O-methylcytidine-3'-phosphate
  modified_base 6: mod_base = OTHER; note = 2'-O-methylcytidine-3'-phosphate
  modified_base 8: mod_base = OTHER; note = 2'-O-methylcytidine-3'-phosphate
  modified_base 9: mod_base = OTHER; note = 2'-O-methyluridine-3'-phosphate
  modified_base 10: mod_base = OTHER; note = 2'-O-methylguanosine-3'-phosphate
  modified_base 11: mod_base = OTHER; note = 2'-O-methylguanosine-3'-phosphate
  modified_base 13: mod_base = OTHER; note = 2'-O-methylcytidine-3'-phosphate
  modified_base 14: mod_base = OTHER; note = 2'-deoxy-2'-fluoroadenosine-3'-phosphate
  modified_base 15: mod_base = OTHER; note = 2'-O-methylguanosine-3'-phosphate
  modified_base 16: mod_base = OTHER; note = 2'-O-methylcytidine-3'-phosphate
  modified_base 17: mod_base = OTHER; note = 2'-O-methyladenosine-3'-phosphate
  modified_base 18: mod_base = OTHER; note = 2'-O-methylcytidine-3'-phosphate
  modified_base 19: mod_base = OTHER; note = 2'-O-methyluridine-3'-phosphate
  modified_base 20: mod_base = OTHER; note = 2'-O-methyladenosine-3'-phosphate
  modified_base 21: mod_base = OTHER; note = 2'-O-methylguanosine-3'-phosphorothioate
  modified_base 22: mod_base = OTHER; note = 2'-O-methyluridine-3'-phosphorothioate
  modified_base 23: mod_base = OTHER; note = 2'-O-methyluridine
  misc_feature 1: note = RNA
  misc_feature 3..4: note = RNA
  misc_feature 6: note = RNA
  misc_feature 8..11: note = RNA
  misc_feature 13..23: note = RNA
  misc_feature 2: note = DNA
  misc_feature 5: note = DNA
  misc_feature 7: note = DNA
  misc_feature 12: note = DNA
tttctcactggacagcactagtt

SEQ ID NO: 748 - DNA, 23 bp, synthetic construct
  source 1..23: mol_type = other DNA
  modified_base 1: mod_base = OTHER; note = 2'-O-methyluridine-3'-phosphorothioate
  modified_base 2: mod_base = OTHER; note = 2'-deoxythymidine-3'-phosphorothioate
  modified_base 3: mod_base = OTHER; note = 2'-O-methylguanosine-3'-phosphate
  modified_base 4: mod_base = OTHER; note = 2'-O-methyladenosine-3'-phosphate
  modified_base 6: mod_base = OTHER; note = 2'-O-methyluridine-3'-phosphate
  modified_base 8: mod_base = OTHER; note = 2'-O-methyluridine-3'-phosphate
  modified_base 9: mod_base = OTHER; note = 2'-O-methylguanosine-3'-phosphate
  modified_base 10: mod_base = OTHER; note = 2'-O-methyladenosine-3'-phosphate
  modified_base 11: mod_base = OTHER; note = 2'-O-methyladenosine-3'-phosphate
  modified_base 13: mod_base = OTHER; note = 2'-O-methylcytidine-3'-phosphate
  modified_base 14: mod_base = OTHER; note = 2'-deoxy-2'-fluorocytidine-3'-phosphate
  modified_base 15: mod_base = OTHER; note = 2'-O-methylcytidine-3'-phosphate
  modified_base 16: mod_base = OTHER; note = 2'-O-methyluridine-3'-phosphate
  modified_base 17: mod_base = OTHER; note = 2'-O-methylcytidine-3'-phosphate
  modified_base 18: mod_base = OTHER; note = 2'-O-methyladenosine-3'-phosphate
  modified_base 19: mod_base = OTHER; note = 2'-O-methyluridine-3'-phosphate
  modified_base 20: mod_base = OTHER; note = 2'-O-methyluridine-3'-phosphate
  modified_base 21: mod_base = OTHER; note = 2'-O-methyluridine-3'-phosphorothioate
  modified_base 22: mod_base = OTHER; note = 2'-O-methyluridine-3'-phosphorothioate
  modified_base 23: mod_base = OTHER; note = 2'-O-methylcytidine
  misc_feature 1: note = RNA
  misc_feature 3..4: note = RNA
  misc_feature 6: note = RNA
  misc_feature 8..11: note = RNA
  misc_feature 13..23: note = RNA
  misc_feature 2: note = DNA
  misc_feature 5: note = DNA
  misc_feature 7: note = DNA
  misc_feature 12: note = DNA
ttgactgtgaaaccctcattttc

SEQ ID NO: 749 - DNA, 23 bp, synthetic construct
  source 1..23: mol_type = other DNA
  modified_base 1: mod_base = OTHER; note = 2'-O-methyladenosine-3'-phosphorothioate
  modified_base 2: mod_base = OTHER; note = 2'-deoxyguanosine-3'-phosphorothioate
  modified_base 3: mod_base = OTHER; note = 2'-O-methyluridine-3'-phosphate
  modified_base 4: mod_base = OTHER; note = 2'-O-methyladenosine-3'-phosphate
  modified_base 6: mod_base = OTHER; note = 2'-O-methyluridine-3'-phosphate
  modified_base 8: mod_base = OTHER; note = 2'-O-methylguanosine-3'-phosphate
  modified_base 9: mod_base = OTHER; note = 2'-O-methyluridine-3'-phosphate
  modified_base 10: mod_base = OTHER; note = 2'-O-methyluridine-3'-phosphate
  modified_base 11: mod_base = OTHER; note = 2'-O-methylguanosine-3'-phosphate
  modified_base 13: mod_base = OTHER; note = 2'-O-methyladenosine-3'-phosphate
  modified_base 14: mod_base = OTHER; note = 2'-deoxy-2'-fluoroguanosine-3'-phosphate
  modified_base 15: mod_base = OTHER; note = 2'-O-methyluridine-3'-phosphate
  modified_base 16: mod_base = OTHER; note = 2'-O-methyluridine-3'-phosphate
  modified_base 17: mod_base = OTHER; note = 2'-O-methylguanosine-3'-phosphate
  modified_base 18: mod_base = OTHER; note = 2'-O-methylcytidine-3'-phosphate
  modified_base 19: mod_base = OTHER; note = 2'-O-methylcytidine-3'-phosphate
  modified_base 20: mod_base = OTHER; note = 2'-O-methylcytidine-3'-phosphate
  modified_base 21: mod_base = OTHER; note = 2'-O-methyladenosine-3'-phosphorothioate
  modified_base 22: mod_base = OTHER; note = 2'-O-methylcytidine-3'-phosphorothioate
  modified_base 23: mod_base = OTHER; note = 2'-O-methylguanosine
  misc_feature 1: note = RNA
  misc_feature 3..4: note = RNA
  misc_feature 6: note = RNA
  misc_feature 8..11: note = RNA
  misc_feature 13..23: note = RNA
  misc_feature 2: note = DNA
  misc_feature 5: note = DNA
  misc_feature 7: note = DNA
  misc_feature 12: note = DNA
agtaattgttggagttgcccacg

SEQ ID NO: 750 - DNA, 23 bp, synthetic construct
  source 1..23: mol_type = other DNA
  modified_base 1: mod_base = OTHER; note = 2'-O-methyladenosine-3'-phosphorothioate
  modified_base 2: mod_base = OTHER; note = 2'-deoxyguanosine-3'-phosphorothioate
  modified_base 3: mod_base = OTHER; note = 2'-O-methyluridine-3'-phosphate
  modified_base 4: mod_base = OTHER; note = 2'-O-methyluridine-3'-phosphate
  modified_base 6: mod_base = OTHER; note = 2'-O-methyladenosine-3'-phosphate
  modified_base 8: mod_base = OTHER; note = 2'-O-methylcytidine-3'-phosphate
  modified_base 9: mod_base = OTHER; note = 2'-O-methyluridine-3'-phosphate
  modified_base 10: mod_base = OTHER; note = 2'-O-methyluridine-3'-phosphate
  modified_base 11: mod_base = OTHER; note = 2'-O-methyluridine-3'-phosphate
  modified_base 13: mod_base = OTHER; note = 2'-O-methylguanosine-3'-phosphate
  modified_base 14: mod_base = OTHER; note = 2'-deoxy-2'-fluorocytidine-3'-phosphate
  modified_base 15: mod_base = OTHER; note = 2'-O-methylcytidine-3'-phosphate
  modified_base 16: mod_base = OTHER; note = 2'-O-methyluridine-3'-phosphate
  modified_base 17: mod_base = OTHER; note = 2'-O-methyluridine-3'-phosphate
  modified_base 18: mod_base = OTHER; note = 2'-O-methyladenosine-3'-phosphate
  modified_base 19: mod_base = OTHER; note = 2'-O-methylguanosine-3'-phosphate
  modified_base 20: mod_base = OTHER; note = 2'-O-methylcytidine-3'-phosphate
  modified_base 21: mod_base = OTHER; note = 2'-O-methyladenosine-3'-phosphorothioate
  modified_base 22: mod_base = OTHER; note = 2'-O-methyluridine-3'-phosphorothioate
  modified_base 23: mod_base = OTHER; note = 2'-O-methylguanosine
  misc_feature 1: note = RNA
  misc_feature 3..4: note = RNA
  misc_feature 6: note = RNA
  misc_feature 8..11: note = RNA
  misc_feature 13..23: note = RNA
  misc_feature 2: note = DNA
  misc_feature 5: note = DNA
  misc_feature 7: note = DNA
  misc_feature 12: note = DNA
agttgatctttggccttagcatg

SEQ ID NO: 751 - DNA, 23 bp, synthetic construct
  source 1..23: mol_type = other DNA
  modified_base 1: mod_base = OTHER; note = 2'-O-methyladenosine-3'-phosphorothioate
  modified_base 2: mod_base = OTHER; note = 2'-deoxycytidine-3'-phosphorothioate
  modified_base 3: mod_base = OTHER; note = 2'-O-methyluridine-3'-phosphate
  modified_base 4: mod_base = OTHER; note = 2'-O-methyluridine-3'-phosphate
  modified_base 6: mod_base = OTHER; note = 2'-O-methylguanosine-3'-phosphate
  modified_base 8: mod_base = OTHER; note = 2'-O-methylcytidine-3'-phosphate
  modified_base 9: mod_base = OTHER; note = 2'-O-methyluridine-3'-phosphate
  modified_base 10: mod_base = OTHER; note = 2'-O-methylcytidine-3'-phosphate
  modified_base 11: mod_base = OTHER; note = 2'-O-methyluridine-3'-phosphate
  modified_base 13: mod_base = OTHER; note = 2'-O-methylcytidine-3'-phosphate
  modified_base 14: mod_base = OTHER; note = 2'-deoxy-2'-fluorouridine-3'-phosphate
  modified_base 15: mod_base = OTHER; note = 2'-O-methylguanosine-3'-phosphate
  modified_base 16: mod_base = OTHER; note = 2'-O-methyladenosine-3'-phosphate
  modified_base 17: mod_base = OTHER; note = 2'-O-methyluridine-3'-phosphate
  modified_base 18: mod_base = OTHER; note = 2'-O-methylcytidine-3'-phosphate
  modified_base 19: mod_base = OTHER; note = 2'-O-methylguanosine-3'-phosphate
  modified_base 20: mod_base = OTHER; note = 2'-O-methylcytidine-3'-phosphate
  modified_base 21: mod_base = OTHER; note = 2'-O-methyladenosine-3'-phosphorothioate
  modified_base 22: mod_base = OTHER; note = 2'-O-methylguanosine-3'-phosphorothioate
  modified_base 23: mod_base = OTHER; note = 2'-O-methylguanosine
  misc_feature 1: note = RNA
  misc_feature 3..4: note = RNA
  misc_feature 6: note = RNA
  misc_feature 8..11: note = RNA
  misc_feature 13..23: note = RNA
  misc_feature 2: note = DNA
  misc_feature 5: note = DNA
  misc_feature 7: note = DNA
  misc_feature 12: note = DNA
acttggtctcttctgatcgcagg

SEQ ID NO: 752 - DNA, 23 bp, synthetic construct
  source 1..23: mol_type = other DNA
  modified_base 1: mod_base = OTHER; note = 2'-O-methyladenosine-3'-phosphorothioate
  modified_base 2: mod_base = OTHER; note = 2'-deoxythymidine-3'-phosphorothioate
  modified_base 3: mod_base = OTHER; note = 2'-O-methylguanosine-3'-phosphate
  modified_base 4: mod_base = OTHER; note = 2'-O-methyluridine-3'-phosphate
  modified_base 6: mod_base = OTHER; note = 2'-O-methylguanosine-3'-phosphate
  modified_base 8: mod_base = OTHER; note = 2'-O-methyluridine-3'-phosphate
  modified_base 9: mod_base = OTHER; note = 2'-O-methylguanosine-3'-phosphate
  modified_base 10: mod_base = OTHER; note = 2'-O-methylguanosine-3'-phosphate
  modified_base 11: mod_base = OTHER; note = 2'-O-methyluridine-3'-phosphate
  modified_base 13: mod_base = OTHER; note = 2'-O-methyluridine-3'-phosphate
  modified_base 14: mod_base = OTHER; note = 2'-deoxy-2'-fluorouridine-3'-phosphate
  modified_base 15: mod_base = OTHER; note = 2'-O-methylguanosine-3'-phosphate
  modified_base 16: mod_base = OTHER; note = 2'-O-methyluridine-3'-phosphate
  modified_base 17: mod_base = OTHER; note = 2'-O-methylcytidine-3'-phosphate
  modified_base 18: mod_base = OTHER; note = 2'-O-methyluridine-3'-phosphate
  modified_base 19: mod_base = OTHER; note = 2'-O-methylguanosine-3'-phosphate
  modified_base 20: mod_base = OTHER; note = 2'-O-methyluridine-3'-phosphate
  modified_base 21: mod_base = OTHER; note = 2'-O-methylcytidine-3'-phosphorothioate
  modified_base 22: mod_base = OTHER; note = 2'-O-methyluridine-3'-phosphorothioate
  modified_base 23: mod_base = OTHER; note = 2'-O-methylguanosine
  misc_feature 1: note = RNA
  misc_feature 3..4: note = RNA
  misc_feature 6: note = RNA
  misc_feature 8..11: note = RNA
  misc_feature 13..23: note = RNA
  misc_feature 2: note = DNA
  misc_feature 5: note = DNA
  misc_feature 7: note = DNA
  misc_feature 12: note = DNA
atgtagatggtcttgtctgtctg

SEQ ID NO: 753 - DNA, 23 bp, synthetic construct
  source 1..23: mol_type = other DNA
  modified_base 1: mod_base = OTHER; note = 2'-O-methyladenosine-3'-phosphorothioate
  modified_base 2: mod_base = OTHER; note = 2'-deoxyadenosine-3'-phosphorothioate
  modified_base 3: mod_base = OTHER; note = 2'-O-methyluridine-3'-phosphate
  modified_base 4: mod_base = OTHER; note = 2'-O-methylguanosine-3'-phosphate
  modified_base 6: mod_base = OTHER; note = 2'-O-methyladenosine-3'-phosphate
  modified_base 8: mod_base = OTHER; note = 2'-O-methyladenosine-3'-phosphate
  modified_base 9: mod_base = OTHER; note = 2'-O-methyladenosine-3'-phosphate
  modified_base 10: mod_base = OTHER; note = 2'-O-methylguanosine-3'-phosphate
  modified_base 11: mod_base = OTHER; note = 2'-O-methyluridine-3'-phosphate
  modified_base 13: mod_base = OTHER; note = 2'-O-methylcytidine-3'-phosphate
  modified_base 14: mod_base = OTHER; note = 2'-deoxy-2'-fluorouridine-3'-phosphate
  modified_base 15: mod_base = OTHER; note = 2'-O-methylguanosine-3'-phosphate
  modified_base 16: mod_base = OTHER; note = 2'-O-methylcytidine-3'-phosphate
  modified_base 17: mod_base = OTHER; note = 2'-O-methyladenosine-3'-phosphate
  modified_base 18: mod_base = OTHER; note = 2'-O-methyluridine-3'-phosphate
  modified_base 19: mod_base = OTHER; note = 2'-O-methyluridine-3'-phosphate
  modified_base 20: mod_base = OTHER; note = 2'-O-methyladenosine-3'-phosphate
  modified_base 21: mod_base = OTHER; note = 2'-O-methylcytidine-3'-phosphorothioate
  modified_base 22: mod_base = OTHER; note = 2'-O-methyluridine-3'-phosphorothioate
  modified_base 23: mod_base = OTHER; note = 2'-O-methylguanosine
  misc_feature 1: note = RNA
  misc_feature 3..4: note = RNA
  misc_feature 6: note = RNA
  misc_feature 8..11: note = RNA
  misc_feature 13..23: note = RNA
  misc_feature 2: note = DNA
  misc_feature 5: note = DNA
  misc_feature 7: note = DNA
  misc_feature 12: note = DNA
aatgaagaagtcctgcattactg

SEQ ID NO: 754 - DNA, 23 bp, synthetic construct
  source 1..23: mol_type = other DNA
  modified_base 1: mod_base = OTHER; note = 2'-O-methyluridine-3'-phosphorothioate
  modified_base 2: mod_base = OTHER; note = 2'-deoxyadenosine-3'-phosphorothioate
  modified_base 3: mod_base = OTHER; note = 2'-O-methyluridine-3'-phosphate
  modified_base 4: mod_base = OTHER; note = 2'-O-methylcytidine-3'-phosphate
  modified_base 6: mod_base = OTHER; note = 2'-O-methyladenosine-3'-phosphate
  modified_base 8: mod_base = OTHER; note = 2'-O-methylguanosine-3'-phosphate
  modified_base 9: mod_base = OTHER; note = 2'-O-methyluridine-3'-phosphate
  modified_base 10: mod_base = OTHER; note = 2'-O-methyluridine-3'-phosphate
  modified_base 11: mod_base = OTHER; note = 2'-O-methylcytidine-3'-phosphate
  modified_base 13: mod_base = OTHER; note = 2'-O-methylguanosine-3'-phosphate
  modified_base 14: mod_base = OTHER; note = 2'-deoxy-2'-fluorouridine-3'-phosphate
  modified_base 15: mod_base = OTHER; note = 2'-O-methyluridine-3'-phosphate
  modified_base 16: mod_base = OTHER; note = 2'-O-methylcytidine-3'-phosphate
  modified_base 17: mod_base = OTHER; note = 2'-O-methylcytidine-3'-phosphate
  modified_base 18: mod_base = OTHER; note = 2'-O-methyluridine-3'-phosphate
  modified_base 19: mod_base = OTHER; note = 2'-O-methylguanosine-3'-phosphate
  modified_base 20: mod_base = OTHER; note = 2'-O-methylguanosine-3'-phosphate
  modified_base 21: mod_base = OTHER; note = 2'-O-methyluridine-3'-phosphorothioate
  modified_base 22: mod_base = OTHER; note = 2'-O-methylguanosine-3'-phosphorothioate
  modified_base 23: mod_base = OTHER; note = 2'-O-methylguanosine
  misc_feature 1: note = RNA
  misc_feature 3..4: note = RNA
  misc_feature 6: note = RNA
  misc_feature 8..11: note = RNA
  misc_feature 13..23: note = RNA
  misc_feature 2: note = DNA
  misc_feature 5: note = DNA
  misc_feature 7: note = DNA
  misc_feature 12: note = DNA
tatcaaggttcagttcctggtgg

SEQ ID NO: 755 - DNA, 23 bp, synthetic construct
  source 1..23: mol_type = other DNA
  modified_base 1: mod_base = OTHER; note = 2'-O-methyladenosine-3'-phosphorothioate
  modified_base 2: mod_base = OTHER; note = 2'-deoxyguanosine-3'-phosphorothioate
  modified_base 3: mod_base = OTHER; note = 2'-O-methyluridine-3'-phosphate
  modified_base 4: mod_base = OTHER; note = 2'-O-methyluridine-3'-phosphate
  modified_base 6: mod_base = OTHER; note = 2'-O-methyladenosine-3'-phosphate
  modified_base 8: mod_base = OTHER; note = 2'-O-methyluridine-3'-phosphate
  modified_base 9: mod_base = OTHER; note = 2'-O-methylguanosine-3'-phosphate
  modified_base 10: mod_base = OTHER; note = 2'-O-methyladenosine-3'-phosphate
  modified_base 11: mod_base = OTHER; note = 2'-O-methylguanosine-3'-phosphate
  modified_base 13: mod_base = OTHER; note = 2'-O-methylcytidine-3'-phosphate
  modified_base 14: mod_base = OTHER; note = 2'-deoxy-2'-fluoroadenosine-3'-phosphate
  modified_base 15: mod_base = OTHER; note = 2'-O-methyladenosine-3'-phosphate
  modified_base 16: mod_base = OTHER; note = 2'-O-methylcytidine-3'-phosphate
  modified_base 17: mod_base = OTHER; note = 2'-O-methylguanosine-3'-phosphate
  modified_base 18: mod_base = OTHER; note = 2'-O-methylcytidine-3'-phosphate
  modified_base 19: mod_base = OTHER; note = 2'-O-methyladenosine-3'-phosphate
  modified_base 20: mod_base = OTHER; note = 2'-O-methylcytidine-3'-phosphate
  modified_base 21: mod_base = OTHER; note = 2'-O-methylguanosine-3'-phosphorothioate
  modified_base 22: mod_base = OTHER; note = 2'-O-methyladenosine-3'-phosphorothioate
  modified_base 23: mod_base = OTHER; note = 2'-O-methylcytidine
  misc_feature 1: note = RNA
  misc_feature 3..4: note = RNA
  misc_feature 6: note = RNA
  misc_feature 8..11: note = RNA
  misc_feature 13..23: note = RNA
  misc_feature 2: note = DNA
  misc_feature 5: note = DNA
  misc_feature 7: note = DNA
  misc_feature 12: note = DNA
agttcattgagccaacgcacgac

SEQ ID NO: 756 - DNA, 23 bp, synthetic construct
  source 1..23: mol_type = other DNA
  modified_base 1: mod_base = OTHER; note = 2'-O-methyladenosine-3'-phosphorothioate
  modified_base 2: mod_base = OTHER; note = 2'-deoxythymidine-3'-phosphorothioate
  modified_base 3: mod_base = OTHER; note = 2'-O-methylcytidine-3'-phosphate
  modified_base 4: mod_base = OTHER; note = 2'-O-methyluridine-3'-phosphate
  modified_base 6: mod_base = OTHER; note = 2'-O-methylguanosine-3'-phosphate
  modified_base 8: mod_base = OTHER; note = 2'-O-methyladenosine-3'-phosphate
  modified_base 9: mod_base = OTHER; note = 2'-O-methylcytidine-3'-phosphate
  modified_base 10: mod_base = OTHER; note = 2'-O-methyladenosine-3'-phosphate
  modified_base 11: mod_base = OTHER; note = 2'-O-methylcytidine-3'-phosphate
  modified_base 13: mod_base = OTHER; note = 2'-O-methyluridine-3'-phosphate
  modified_base 14: mod_base = OTHER; note = 2'-deoxy-2'-fluoroadenosine-3'-phosphate
  modified_base 15: mod_base = OTHER; note = 2'-O-methylguanosine-3'-phosphate
  modified_base 16: mod_base = OTHER; note = 2'-O-methyluridine-3'-phosphate
  modified_base 17: mod_base = OTHER; note = 2'-O-methylcytidine-3'-phosphate
  modified_base 18: mod_base = OTHER; note = 2'-O-methylcytidine-3'-phosphate
  modified_base 19: mod_base = OTHER; note = 2'-O-methyladenosine-3'-phosphate
  modified_base 20: mod_base = OTHER; note = 2'-O-methylcytidine-3'-phosphate
  modified_base 21: mod_base = OTHER; note = 2'-O-methyluridine-3'-phosphorothioate
  modified_base 22: mod_base = OTHER; note = 2'-O-methylcytidine-3'-phosphorothioate
  modified_base 23: mod_base = OTHER; note = 2'-O-methylcytidine
  misc_feature 1: note = RNA
  misc_feature 3..4: note = RNA
  misc_feature 6: note = RNA
  misc_feature 8..11: note = RNA
  misc_feature 13..23: note = RNA
  misc_feature 2: note = DNA
  misc_feature 5: note = DNA
  misc_feature 7: note = DNA
  misc_feature 12: note = DNA
atcttgtacacatagtccactcc

SEQ ID NO: 757 - DNA, 23 bp, synthetic construct
  source 1..23: mol_type = other DNA
  modified_base 1: mod_base = OTHER; note = 2'-O-methyluridine-3'-phosphorothioate
  modified_base 2: mod_base = OTHER; note = 2'-deoxythymidine-3'-phosphorothioate
  modified_base 3: mod_base = OTHER; note = 2'-O-methylcytidine-3'-phosphate
  modified_base 4: mod_base = OTHER; note = 2'-O-methylguanosine-3'-phosphate
  modified_base 6: mod_base = OTHER; note = 2'-O-methyladenosine-3'-phosphate
  modified_base 8: mod_base = OTHER; note = 2'-O-methylcytidine-3'-phosphate
  modified_base 9: mod_base = OTHER; note = 2'-O-methyluridine-3'-phosphate
  modified_base 10: mod_base = OTHER; note = 2'-O-methylguanosine-3'-phosphate
  modified_base 11: mod_base = OTHER; note = 2'-O-methylguanosine-3'-phosphate
  modified_base 13: mod_base = OTHER; note = 2'-O-methylcytidine-3'-phosphate
  modified_base 14: mod_base = OTHER; note = 2'-deoxy-2'-fluoroadenosine-3'-phosphate
  modified_base 15: mod_base = OTHER; note = 2'-O-methylguanosine-3'-phosphate
  modified_base 16: mod_base = OTHER; note = 2'-O-methylcytidine-3'-phosphate
  modified_base 17: mod_base = OTHER; note = 2'-O-methyladenosine-3'-phosphate
  modified_base 18: mod_base = OTHER; note = 2'-O-methylcytidine-3'-phosphate
  modified_base 19: mod_base = OTHER; note = 2'-O-methylguanosine-3'-phosphate
  modified_base 20: mod_base = OTHER; note = 2'-O-methyluridine-3'-phosphate
  modified_base 21: mod_base = OTHER; note = 2'-O-methyladenosine-3'-phosphorothioate
  modified_base 22: mod_base = OTHER; note = 2'-O-methylcytidine-3'-phosphorothioate
  modified_base 23: mod_base = OTHER; note = 2'-O-methyluridine
  misc_feature 1: note = RNA
  misc_feature 3..4: note = RNA
  misc_feature 6: note = RNA
  misc_feature 8..11: note = RNA
  misc_feature 13..23: note = RNA
  misc_feature 2: note = DNA
  misc_feature 5: note = DNA
  misc_feature 7: note = DNA
  misc_feature 12: note = DNA
ttcgaaactgggcagcacgtact

SEQ ID NO: 758 - DNA, 23 bp, synthetic construct
  source 1..23: mol_type = other DNA
  modified_base 1: mod_base = OTHER; note = 2'-O-methyluridine-3'-phosphorothioate
  modified_base 2: mod_base = OTHER; note = 2'-deoxycytidine-3'-phosphorothioate
  modified_base 3: mod_base = OTHER; note = 2'-O-methylguanosine-3'-phosphate
  modified_base 4: mod_base = OTHER; note = 2'-O-methyladenosine-3'-phosphate
  modified_base 6: mod_base = OTHER; note = 2'-O-methylcytidine-3'-phosphate
  modified_base 8: mod_base = OTHER; note = 2'-O-methyladenosine-3'-phosphate
  modified_base 9: mod_base = OTHER; note = 2'-O-methylcytidine-3'-phosphate
  modified_base 10: mod_base = OTHER; note = 2'-O-methyladenosine-3'-phosphate
  modified_base 11: mod_base = OTHER; note = 2'-O-methylguanosine-3'-phosphate
  modified_base 13: mod_base = OTHER; note = 2'-O-methylguanosine-3'-phosphate
  modified_base 14: mod_base = OTHER; note = 2'-deoxy-2'-fluorouridine-3'-phosphate
  modified_base 15: mod_base = OTHER; note = 2'-O-methyladenosine-3'-phosphate
  modified_base 16: mod_base = OTHER; note = 2'-O-methylguanosine-3'-phosphate
  modified_base 17: mod_base = OTHER; note = 2'-O-methylguanosine-3'-phosphate
  modified_base 18: mod_base = OTHER; note = 2'-O-methylguanosine-3'-phosphate
  modified_base 19: mod_base = OTHER; note = 2'-O-methyluridine-3'-phosphate
  modified_base 20: mod_base = OTHER; note = 2'-O-methyladenosine-3'-phosphate
  modified_base 21: mod_base = OTHER; note = 2'-O-methylguanosine-3'-phosphorothioate
  modified_base 22: mod_base = OTHER; note = 2'-O-methylcytidine-3'-phosphorothioate
  modified_base 23: mod_base = OTHER; note = 2'-O-methylcytidine
  misc_feature 1: note = RNA
  misc_feature 3..4: note = RNA
  misc_feature 6: note = RNA
  misc_feature 8..11: note = RNA
  misc_feature 13..23: note = RNA
  misc_feature 2: note = DNA
  misc_feature 5: note = DNA
  misc_feature 7: note = DNA
  misc_feature 12: note = DNA
tcgaacaacagagtagggtagcc

SEQ ID NO: 759 - DNA, 23 bp, synthetic construct
  source 1..23: mol_type = other DNA
  modified_base 1: mod_base = OTHER; note = 2'-O-methyladenosine-3'-phosphorothioate
  modified_base 2: mod_base = OTHER; note = 2'-deoxycytidine-3'-phosphorothioate
  modified_base 3: mod_base = OTHER; note = 2'-O-methyluridine-3'-phosphate
  modified_base 4: mod_base = OTHER; note = 2'-O-methylguanosine-3'-phosphate
  modified_base 6: mod_base = OTHER; note = 2'-O-methylcytidine-3'-phosphate
  modified_base 8: mod_base = OTHER; note = 2'-O-methylguanosine-3'-phosphate
  modified_base 9: mod_base = OTHER; note = 2'-O-methylguanosine-3'-phosphate
  modified_base 10: mod_base = OTHER; note = 2'-O-methyladenosine-3'-phosphate
  modified_base 11: mod_base = OTHER; note = 2'-O-methyluridine-3'-phosphate
  modified_base 13: mod_base = OTHER; note = 2'-O-methyladenosine-3'-phosphate
  modified_base 14: mod_base = OTHER; note = 2'-deoxy-2'-fluoroadenosine-3'-phosphate
  modified_base 15: mod_base = OTHER; note = 2'-O-methylguanosine-3'-phosphate
  modified_base 16: mod_base = OTHER; note = 2'-O-methyladenosine-3'-phosphate
  modified_base 17: mod_base = OTHER; note = 2'-O-methylguanosine-3'-phosphate
  modified_base 18: mod_base = OTHER; note = 2'-O-methylguanosine-3'-phosphate
  modified_base 19: mod_base = OTHER; note = 2'-O-methyluridine-3'-phosphate
  modified_base 20: mod_base = OTHER; note = 2'-O-methyladenosine-3'-phosphate
  modified_base 21: mod_base = OTHER; note = 2'-O-methylcytidine-3'-phosphorothioate
  modified_base 22: mod_base = OTHER; note = 2'-O-methylcytidine-3'-phosphorothioate
  modified_base 23: mod_base = OTHER; note = 2'-O-methylcytidine
  misc_feature 1: note = RNA
  misc_feature 3..4: note = RNA
  misc_feature 6: note = RNA
  misc_feature 8..11: note = RNA
  misc_feature 13..23: note = RNA
  misc_feature 2: note = DNA
  misc_feature 5: note = DNA
  misc_feature 7: note = DNA
  misc_feature 12: note = DNA
actgtctggatgaagaggtaccc

SEQ ID NO: 760 - DNA, 23 bp, synthetic construct
  source 1..23: mol_type = other DNA
  modified_base 1: mod_base = OTHER; note = 2'-O-methyladenosine-3'-phosphorothioate
  modified_base 2: mod_base = OTHER; note = 2'-deoxyguanosine-3'-phosphorothioate
  modified_base 3: mod_base = OTHER; note = 2'-O-methyladenosine-3'-phosphate
  modified_base 4: mod_base = OTHER; note = 2'-O-methyluridine-3'-phosphate
  modified_base 6: mod_base = OTHER; note = 2'-O-methylcytidine-3'-phosphate
  modified_base 8: mod_base = OTHER; note = 2'-O-methylcytidine-3'-phosphate
  modified_base 9: mod_base = OTHER; note = 2'-O-methyladenosine-3'-phosphate
  modified_base 10: mod_base = OTHER; note = 2'-O-methylguanosine-3'-phosphate
  modified_base 11: mod_base = OTHER; note = 2'-O-methyluridine-3'-phosphate
  modified_base 13: mod_base = OTHER; note = 2'-O-methylguanosine-3'-phosphate
  modified_base 14: mod_base = OTHER; note = 2'-deoxy-2'-fluoroadenosine-3'-phosphate
  modified_base 15: mod_base = OTHER; note = 2'-O-methyluridine-3'-phosphate
  modified_base 16: mod_base = OTHER; note = 2'-O-methyladenosine-3'-phosphate
  modified_base 17: mod_base = OTHER; note = 2'-O-methylcytidine-3'-phosphate
  modified_base 18: mod_base = OTHER; note = 2'-O-methylguanosine-3'-phosphate
  modified_base 19: mod_base = OTHER; note = 2'-O-methylguanosine-3'-phosphate
  modified_base 20: mod_base = OTHER; note = 2'-O-methyluridine-3'-phosphate
  modified_base 21: mod_base = OTHER; note = 2'-O-methylguanosine-3'-phosphorothioate
  modified_base 22: mod_base = OTHER; note = 2'-O-methylguanosine-3'-phosphorothioate
  modified_base 23: mod_base = OTHER; note = 2'-O-methylguanosine
  misc_feature 1: note = RNA
  misc_feature 3..4: note = RNA
  misc_feature 6: note = RNA
  misc_feature 8..11: note = RNA
  misc_feature 13..23: note = RNA
  misc_feature 2: note = DNA
  misc_feature 5: note = DNA
  misc_feature 7: note = DNA
  misc_feature 12: note = DNA
agattcccagtggatacggtggg

SEQ ID NO: 761 - DNA, 23 bp, synthetic construct
  source 1..23: mol_type = other DNA
  modified_base 1: mod_base = OTHER; note = 2'-O-methyladenosine-3'-phosphorothioate
  modified_base 2: mod_base = OTHER; note = 2'-deoxycytidine-3'-phosphorothioate
  modified_base 3: mod_base = OTHER; note = 2'-O-methyluridine-3'-phosphate
  modified_base 4: mod_base = OTHER; note = 2'-O-methyluridine-3'-phosphate
  modified_base 6: mod_base = OTHER; note = 2'-O-methyluridine-3'-phosphate
  modified_base 8: mod_base = OTHER; note = 2'-O-methyladenosine-3'-phosphate
  modified_base 9: mod_base = OTHER; note = 2'-O-methyluridine-3'-phosphate
  modified_base 10: mod_base = OTHER; note = 2'-O-methyluridine-3'-phosphate
  modified_base 11: mod_base = OTHER; note = 2'-O-methylcytidine-3'-phosphate
  modified_base 13: mod_base = OTHER; note = 2'-O-methylguanosine-3'-phosphate
  modified_base 14: mod_base = OTHER; note = 2'-deoxy-2'-fluorocytidine-3'-phosphate
  modified_base 15: mod_base = OTHER; note = 2'-O-methyladenosine-3'-phosphate
  modified_base 16: mod_base = OTHER; note = 2'-O-methylcytidine-3'-phosphate
  modified_base 17: mod_base = OTHER; note = 2'-O-methylguanosine-3'-phosphate
  modified_base 18: mod_base = OTHER; note = 2'-O-methyladenosine-3'-phosphate
  modified_base 19: mod_base = OTHER; note = 2'-O-methyladenosine-3'-phosphate
  modified_base 20: mod_base = OTHER; note = 2'-O-methylcytidine-3'-phosphate
  modified_base 21: mod_base = OTHER; note = 2'-O-methyladenosine-3'-phosphorothioate
  modified_base 22: mod_base = OTHER; note = 2'-O-methylcytidine-3'-phosphorothioate
  modified_base 23: mod_base = OTHER; note = 2'-O-methylguanosine
  misc_feature 1: note = RNA
  misc_feature 3..4: note = RNA
  misc_feature 6: note = RNA
  misc_feature 8..11: note = RNA
  misc_feature 13..23: note = RNA
  misc_feature 2: note = DNA
  misc_feature 5: note = DNA
  misc_feature 7: note = DNA
  misc_feature 12: note = DNA
acttcttattcagcacgaacacg

SEQ ID NO: 762 - DNA, 23 bp, synthetic construct
  source 1..23: mol_type = other DNA
  modified_base 1: mod_base = OTHER; note = 2'-O-methyladenosine-3'-phosphorothioate
  modified_base 2: mod_base = OTHER; note = 2'-deoxythymidine-3'-phosphorothioate
  modified_base 3: mod_base = OTHER; note = 2'-O-methylguanosine-3'-phosphate
  modified_base 4: mod_base = OTHER; note = 2'-O-methylcytidine-3'-phosphate
  modified_base 6: mod_base = OTHER; note = 2'-O-methyluridine-3'-phosphate
  modified_base 8: mod_base = OTHER; note = 2'-O-methylcytidine-3'-phosphate
  modified_base 9: mod_base = OTHER; note = 2'-O-methylcytidine-3'-phosphate
  modified_base 10: mod_base = OTHER; note = 2'-O-methylguanosine-3'-phosphate
  modified_base 11: mod_base = OTHER; note = 2'-O-methylguanosine-3'-phosphate
  modified_base 13: mod_base = OTHER; note = 2'-O-methyluridine-3'-phosphate
  modified_base 14: mod_base = OTHER; note = 2'-deoxy-2'-fluorouridine-3'-phosphate
  modified_base 15: mod_base = OTHER; note = 2'-O-methylcytidine-3'-phosphate
  modified_base 16: mod_base = OTHER; note = 2'-O-methyluridine-3'-phosphate
  modified_base 17: mod_base = OTHER; note = 2'-O-methylcytidine-3'-phosphate
  modified_base 18: mod_base = OTHER; note = 2'-O-methyladenosine-3'-phosphate
  modified_base 19: mod_base = OTHER; note = 2'-O-methyladenosine-3'-phosphate
  modified_base 20: mod_base = OTHER; note = 2'-O-methyluridine-3'-phosphate
  modified_base 21: mod_base = OTHER; note = 2'-O-methylguanosine-3'-phosphorothioate
  modified_base 22: mod_base = OTHER; note = 2'-O-methyluridine-3'-phosphorothioate
  modified_base 23: mod_base = OTHER; note = 2'-O-methyluridine
  misc_feature 1: note = RNA
  misc_feature 3..4: note = RNA
  misc_feature 6: note = RNA
  misc_feature 8..11: note = RNA
  misc_feature 13..23: note = RNA
  misc_feature 2: note = DNA
  misc_feature 5: note = DNA
  misc_feature 7: note = DNA
  misc_feature 12: note = DNA
atgccttccgggttctcaatgtt

SEQ ID NO: 763 - DNA, 23 bp, synthetic construct
  source 1..23: mol_type = other DNA
  modified_base 1: mod_base = OTHER; note = 2'-O-methyladenosine-3'-phosphorothioate
  modified_base 2: mod_base = OTHER; note = 2'-deoxyguanosine-3'-phosphorothioate
  modified_base 3: mod_base = OTHER; note = 2'-O-methyladenosine-3'-phosphate
  modified_base 4: mod_base = OTHER; note = 2'-O-methyladenosine-3'-phosphate
  modified_base 6: mod_base = OTHER; note = 2'-O-methyluridine-3'-phosphate
  modified_base 8: mod_base = OTHER; note = 2'-O-methyluridine-3'-phosphate
  modified_base 9: mod_base = OTHER; note = 2'-O-methylguanosine-3'-phosphate
  modified_base 10: mod_base = OTHER; note = 2'-O-methyluridine-3'-phosphate
  modified_base 11: mod_base = OTHER; note = 2'-O-methyluridine-3'-phosphate
  modified_base 13: mod_base = OTHER; note = 2'-O-methyladenosine-3'-phosphate
  modified_base 14: mod_base = OTHER; note = 2'-deoxy-2'-fluoroguanosine-3'-phosphate
  modified_base 15: mod_base = OTHER; note = 2'-O-methyladenosine-3'-phosphate
  modified_base 16: mod_base = OTHER; note = 2'-O-methyladenosine-3'-phosphate
  modified_base 17: mod_base = OTHER; note = 2'-O-methylguanosine-3'-phosphate
  modified_base 18: mod_base = OTHER; note = 2'-O-methyladenosine-3'-phosphate
  modified_base 19: mod_base = OTHER; note = 2'-O-methylguanosine-3'-phosphate
  modified_base 20: mod_base = OTHER; note = 2'-O-methylguanosine-3'-phosphate
  modified_base 21: mod_base = OTHER; note = 2'-O-methylcytidine-3'-phosphorothioate
  modified_base 22: mod_base = OTHER; note = 2'-O-methylcytidine-3'-phosphorothioate
  modified_base 23: mod_base = OTHER; note = 2'-O-methylcytidine
  misc_feature 1: note = RNA
  misc_feature 3..4: note = RNA
  misc_feature 6: note = RNA
  misc_feature 8..11: note = RNA
  misc_feature 13..23: note = RNA
  misc_feature 2: note = DNA
  misc_feature 5: note = DNA
  misc_feature 7: note = DNA
  misc_feature 12: note = DNA
agaaatttgttaagaagaggccc

SEQ ID NO: 764 - DNA, 23 bp, synthetic construct
  source 1..23: mol_type = other DNA
  modified_base 1: mod_base = OTHER; note = 2'-O-methyladenosine-3'-phosphorothioate
  modified_base 2: mod_base = OTHER; note = 2'-deoxyguanosine-3'-phosphorothioate
  modified_base 3: mod_base = OTHER; note = 2'-O-methylguanosine-3'-phosphate
  modified_base 4: mod_base = OTHER; note = 2'-O-methyluridine-3'-phosphate
  modified_base 6: mod_base = OTHER; note = 2'-O-methyluridine-3'-phosphate
  modified_base 8: mod_base = OTHER; note = 2'-O-methylguanosine-3'-phosphate
  modified_base 9: mod_base = OTHER; note = 2'-O-methyluridine-3'-phosphate
  modified_base 10: mod_base = OTHER; note = 2'-O-methyladenosine-3'-phosphate
  modified_base 11: mod_base = OTHER; note = 2'-O-methylcytidine-3'-phosphate
  modified_base 13: mod_base = OTHER; note = 2'-O-methylcytidine-3'-phosphate
  modified_base 14: mod_base = OTHER; note = 2'-deoxy-2'-fluoroadenosine-3'-phosphate
  modified_base 15: mod_base = OTHER; note = 2'-O-methyluridine-3'-phosphate
  modified_base 16: mod_base = OTHER; note = 2'-O-methyladenosine-3'-phosphate
  modified_base 17: mod_base = OTHER; note = 2'-O-methylguanosine-3'-phosphate
  modified_base 18: mod_base = OTHER; note = 2'-O-methyluridine-3'-phosphate
  modified_base 19: mod_base = OTHER; note = 2'-O-methylcytidine-3'-phosphate
  modified_base 20: mod_base = OTHER; note = 2'-O-methylcytidine-3'-phosphate
  modified_base 21: mod_base = OTHER; note = 2'-O-methyladenosine-3'-phosphorothioate
  modified_base 22: mod_base = OTHER; note = 2'-O-methylcytidine-3'-phosphorothioate
  modified_base 23: mod_base = OTHER; note = 2'-O-methyluridine
  misc_feature 1: note = RNA
  misc_feature 3..4: note = RNA
  misc_feature 6: note = RNA
  misc_feature 8..11: note = RNA
  misc_feature 13..23: note = RNA
  misc_feature 2: note = DNA
  misc_feature 5: note = DNA
  misc_feature 7: note = DNA
  misc_feature 12: note = DNA
aggtcttgtacacatagtccact

SEQ ID NO: 765 - DNA, 23 bp, synthetic construct
  source 1..23: mol_type = other DNA
  modified_base 1: mod_base = OTHER; note = 2'-O-methyluridine-3'-phosphorothioate
  modified_base 2: mod_base = OTHER; note = 2'-deoxyguanosine-3'-phosphorothioate
  modified_base 3: mod_base = OTHER; note = 2'-O-methylcytidine-3'-phosphate
  modified_base 4: mod_base = OTHER; note = 2'-O-methyluridine-3'-phosphate
  modified_base 6: mod_base = OTHER; note = 2'-O-methyladenosine-3'-phosphate
  modified_base 8: mod_base = OTHER; note = 2'-O-methylcytidine-3'-phosphate
  modified_base 9: mod_base = OTHER; note = 2'-O-methyladenosine-3'-phosphate
  modified_base 10: mod_base = OTHER; note = 2'-O-methylguanosine-3'-phosphate
  modified_base 11: mod_base = OTHER; note = 2'-O-methylguanosine-3'-phosphate
  modified_base 13: mod_base = OTHER; note = 2'-O-methyluridine-3'-phosphate
  modified_base 14: mod_base = OTHER; note = 2'-deoxy-2'-fluorocytidine-3'-phosphate
  modified_base 15: mod_base = OTHER; note = 2'-O-methylcytidine-3'-phosphate
  modified_base 16: mod_base = OTHER; note = 2'-O-methyluridine-3'-phosphate
  modified_base 17: mod_base = OTHER; note = 2'-O-methylcytidine-3'-phosphate
  modified_base 18: mod_base = OTHER; note = 2'-O-methylcytidine-3'-phosphate
  modified_base 19: mod_base = OTHER; note = 2'-O-methylcytidine-3'-phosphate
  modified_base 20: mod_base = OTHER; note = 2'-O-methyladenosine-3'-phosphate
  modified_base 21: mod_base = OTHER; note = 2'-O-methylguanosine-3'-phosphorothioate
  modified_base 22: mod_base = OTHER; note = 2'-O-methylcytidine-3'-phosphorothioate
  modified_base 23: mod_base = OTHER; note = 2'-O-methylguanosine
  misc_feature 1: note = RNA
  misc_feature 3..4: note = RNA
  misc_feature 6: note = RNA
  misc_feature 8..11: note = RNA
  misc_feature 13..23: note = RNA
  misc_feature 2: note = DNA
  misc_feature 5: note = DNA
  misc_feature 7: note = DNA
  misc_feature 12: note = DNA
tgcttaccagggtcctcccagcg

SEQ ID NO: 766 - DNA, 23 bp, synthetic construct
  source 1..23: mol_type = other DNA
  modified_base 1: mod_base = OTHER; note = 2'-O-methyluridine-3'-phosphorothioate
  modified_base 2: mod_base = OTHER; note = 2'-deoxythymidine-3'-phosphorothioate
  modified_base 3: mod_base = OTHER; note = 2'-O-methylcytidine-3'-phosphate
  modified_base 4: mod_base = OTHER; note = 2'-O-methylcytidine-3'-phosphate
  modified_base 6: mod_base = OTHER; note = 2'-O-methylguanosine-3'-phosphate
  modified_base 8: mod_base = OTHER; note = 2'-O-methyluridine-3'-phosphate
  modified_base 9: mod_base = OTHER; note = 2'-O-methylcytidine-3'-phosphate
  modified_base 10: mod_base = OTHER; note = 2'-O-methyladenosine-3'-phosphate
  modified_base 11: mod_base = OTHER; note = 2'-O-methylguanosine-3'-phosphate
  modified_base 13: mod_base = OTHER; note = 2'-O-methyladenosine-3'-phosphate
  modified_base 14: mod_base = OTHER; note = 2'-deoxy-2'-fluorocytidine-3'-phosphate
  modified_base 15: mod_base = OTHER; note = 2'-O-methyladenosine-3'-phosphate
  modified_base 16: mod_base = OTHER; note = 2'-O-methyladenosine-3'-phosphate
  modified_base 17: mod_base = OTHER; note = 2'-O-methylcytidine-3'-phosphate
  modified_base 18: mod_base = OTHER; note = 2'-O-methylcytidine-3'-phosphate
  modified_base 19: mod_base = OTHER; note = 2'-O-methyluridine-3'-phosphate
  modified_base 20: mod_base = OTHER; note = 2'-O-methylcytidine-3'-phosphate
  modified_base 21: mod_base = OTHER; note = 2'-O-methylcytidine-3'-phosphorothioate
  modified_base 22: mod_base = OTHER; note = 2'-O-methylcytidine-3'-phosphorothioate
  modified_base 23: mod_base = OTHER; note = 2'-O-methylcytidine
  misc_feature 1: note = RNA
  misc_feature 3..4: note = RNA
  misc_feature 6: note = RNA
  misc_feature 8..11: note = RNA
  misc_feature 13..23: note = RNA
  misc_feature 2: note = DNA
  misc_feature 5: note = DNA
  misc_feature 7: note = DNA
  misc_feature 12: note = DNA
ttccggctcagcacaacctcccc

SEQ ID NO: 767 - DNA, 23 bp, synthetic construct
  source 1..23: mol_type = other DNA
  modified_base 1: mod_base = OTHER; note = 2'-O-methyladenosine-3'-phosphorothioate
  modified_base 2: mod_base = OTHER; note = 2'-deoxythymidine-3'-phosphorothioate
  modified_base 3: mod_base = OTHER; note = 2'-O-methylcytidine-3'-phosphate
  modified_base 4: mod_base = OTHER; note = 2'-O-methyluridine-3'-phosphate
  modified_base 6: mod_base = OTHER; note = 2'-O-methyluridine-3'-phosphate
  modified_base 8: mod_base = OTHER; note = 2'-O-methyluridine-3'-phosphate
  modified_base 9: mod_base = OTHER; note = 2'-O-methyladenosine-3'-phosphate
  modified_base 10: mod_base = OTHER; note = 2'-O-methylguanosine-3'-phosphate
  modified_base 11: mod_base = OTHER; note = 2'-O-methylguanosine-3'-phosphate
  modified_base 13: mod_base = OTHER; note = 2'-O-methyluridine-3'-phosphate
  modified_base 14: mod_base = OTHER; note = 2'-deoxy-2'-fluorocytidine-3'-phosphate
  modified_base 15: mod_base = OTHER; note = 2'-O-methyladenosine-3'-phosphate
  modified_base 16: mod_base = OTHER; note = 2'-O-methyluridine-3'-phosphate
  modified_base 17: mod_base = OTHER; note = 2'-O-methylguanosine-3'-phosphate
  modified_base 18: mod_base = OTHER; note = 2'-O-methyluridine-3'-phosphate
  modified_base 19: mod_base = OTHER; note = 2'-O-methyladenosine-3'-phosphate
  modified_base 20: mod_base = OTHER; note = 2'-O-methylguanosine-3'-phosphate
  modified_base 21: mod_base = OTHER; note = 2'-O-methyluridine-3'-phosphorothioate
  modified_base 22: mod_base = OTHER; note = 2'-O-methyluridine-3'-phosphorothioate
  modified_base 23: mod_base = OTHER; note = 2'-O-methylguanosine
  misc_feature 1: note = RNA
  misc_feature 3..4: note = RNA
  misc_feature 6: note = RNA
  misc_feature 8..11: note = RNA
  misc_feature 13..23: note = RNA
  misc_feature 2: note = DNA
  misc_feature 5: note = DNA
  misc_feature 7: note = DNA
  misc_feature 12: note = DNA
atctctgtaggttcatgtagttg

SEQ ID NO: 768 - DNA, 23 bp, synthetic construct
  source 1..23: mol_type = other DNA
  modified_base 1: mod_base = OTHER; note = 2'-O-methyluridine-3'-phosphorothioate
  modified_base 2: mod_base = OTHER; note = 2'-deoxycytidine-3'-phosphorothioate
  modified_base 3: mod_base = OTHER; note = 2'-O-methyluridine-3'-phosphate
  modified_base 4: mod_base = OTHER; note = 2'-O-methylguanosine-3'-phosphate
  modified_base 6: mod_base = OTHER; note = 2'-O-methyluridine-3'-phosphate
  modified_base 8: mod_base = OTHER; note = 2'-O-methylcytidine-3'-phosphate
  modified_base 9: mod_base = OTHER; note = 2'-O-methyluridine-3'-phosphate
  modified_base 10: mod_base = OTHER; note = 2'-O-methylguanosine-3'-phosphate
  modified_base 11: mod_base = OTHER; note = 2'-O-methyladenosine-3'-phosphate
  modified_base 13: mod_base = OTHER; note = 2'-O-methyladenosine-3'-phosphate
  modified_base 14: mod_base = OTHER; note = 2'-deoxy-2'-fluoroadenosine-3'-phosphate
  modified_base 15: mod_base = OTHER; note = 2'-O-methylguanosine-3'-phosphate
  modified_base 16: mod_base = OTHER; note = 2'-O-methyladenosine-3'-phosphate
  modified_base 17: mod_base = OTHER; note = 2'-O-methylcytidine-3'-phosphate
  modified_base 18: mod_base = OTHER; note = 2'-O-methyladenosine-3'-phosphate
  modified_base 19: mod_base = OTHER; note = 2'-O-methyladenosine-3'-phosphate
  modified_base 20: mod_base = OTHER; note = 2'-O-methylguanosine-3'-phosphate
  modified_base 21: mod_base = OTHER; note = 2'-O-methylguanosine-3'-phosphorothioate
  modified_base 22: mod_base = OTHER; note = 2'-O-methyladenosine-3'-phosphorothioate
  modified_base 23: mod_base = OTHER; note = 2'-O-methylguanosine
  misc_feature 1: note = RNA
  misc_feature 3..4: note = RNA
  misc_feature 6: note = RNA
  misc_feature 8..11: note = RNA
  misc_feature 13..23: note = RNA
  misc_feature 2: note = DNA
  misc_feature 5: note = DNA
  misc_feature 7: note = DNA
  misc_feature 12: note = DNA
tctggttctgagaagacaaggag

SEQ ID NO: 769 - DNA, 23 bp, synthetic construct
  source 1..23: mol_type = other DNA
  modified_base 1: mod_base = OTHER; note = 2'-O-methyluridine-3'-phosphorothioate
  modified_base 2: mod_base = OTHER; note = 2'-deoxyadenosine-3'-phosphorothioate
  modified_base 3: mod_base = OTHER; note = 2'-O-methylguanosine-3'-phosphate
  modified_base 4: mod_base = OTHER; note = 2'-O-methyladenosine-3'-phosphate
  modified_base 6: mod_base = OTHER; note = 2'-O-methyladenosine-3'-phosphate
  modified_base 8: mod_base = OTHER; note = 2'-O-methyladenosine-3'-phosphate
  modified_base 9: mod_base = OTHER; note = 2'-O-methylguanosine-3'-phosphate
  modified_base 10: mod_base = OTHER; note = 2'-O-methyluridine-3'-phosphate
  modified_base 11: mod_base = OTHER; note = 2'-O-methylguanosine-3'-phosphate
  modified_base 13: mod_base = OTHER; note = 2'-O-methylcytidine-3'-phosphate
  modified_base 14: mod_base = OTHER; note = 2'-deoxy-2'-fluoroadenosine-3'-phosphate
  modified_base 15: mod_base = OTHER; note = 2'-O-methyluridine-3'-phosphate
  modified_base 16: mod_base = OTHER; note = 2'-O-methylcytidine-3'-phosphate
  modified_base 17: mod_base = OTHER; note = 2'-O-methylcytidine-3'-phosphate
  modified_base 18: mod_base = OTHER; note = 2'-O-methyluridine-3'-phosphate
  modified_base 19: mod_base = OTHER; note = 2'-O-methylguanosine-3'-phosphate
  modified_base 20: mod_base = OTHER; note = 2'-O-methylguanosine-3'-phosphate
  modified_base 21: mod_base = OTHER; note = 2'-O-methyluridine-3'-phosphorothioate
  modified_base 22: mod_base = OTHER; note = 2'-O-methylcytidine-3'-phosphorothioate
  modified_base 23: mod_base = OTHER; note = 2'-O-methyluridine
  misc_feature 1: note = RNA
  misc_feature 3..4: note = RNA
  misc_feature 6: note = RNA
  misc_feature 8..11: note = RNA
  misc_feature 13..23: note = RNA
  misc_feature 2: note = DNA
  misc_feature 5: note = DNA
  misc_feature 7: note = DNA
  misc_feature 12: note = DNA
tagacatagtggcatcctggtct

SEQ ID NO: 770 - DNA, 23 bp, synthetic construct
  source 1..23: mol_type = other DNA
  modified_base 1: mod_base = OTHER; note = 2'-O-methyladenosine-3'-phosphorothioate
  modified_base 2: mod_base = OTHER; note = 2'-deoxythymidine-3'-phosphorothioate
  modified_base 3: mod_base = OTHER; note = 2'-O-methylcytidine-3'-phosphate
  modified_base 4: mod_base = OTHER; note = 2'-O-methylcytidine-3'-phosphate
  modified_base 6: mod_base = OTHER; note = 2'-O-methylguanosine-3'-phosphate
  modified_base 8: mod_base = OTHER; note = 2'-O-methyluridine-3'-phosphate
  modified_base 9: mod_base = OTHER; note = 2'-O-methylguanosine-3'-phosphate
  modified_base 10: mod_base = OTHER; note = 2'-O-methylcytidine-3'-phosphate
  modified_base 11: mod_base = OTHER; note = 2'-O-methylguanosine-3'-phosphate
  modified_base 13: mod_base = OTHER; note = 2'-O-methyluridine-3'-phosphate
  modified_base 14: mod_base = OTHER; note = 2'-deoxy-2'-fluorocytidine-3'-phosphate
  modified_base 15: mod_base = OTHER; note = 2'-O-methyluridine-3'-phosphate
  modified_base 16: mod_base = OTHER; note = 2'-O-methylguanosine-3'-phosphate
  modified_base 17: mod_base = OTHER; note = 2'-O-methylcytidine-3'-phosphate
  modified_base 18: mod_base = OTHER; note = 2'-O-methylcytidine-3'-phosphate
  modified_base 19: mod_base = OTHER; note = 2'-O-methyluridine-3'-phosphate
  modified_base 20: mod_base = OTHER; note = 2'-O-methylguanosine-3'-phosphate
  modified_base 21: mod_base = OTHER; note = 2'-O-methylcytidine-3'-phosphorothioate
  modified_base 22: mod_base = OTHER; note = 2'-O-methyladenosine-3'-phosphorothioate
  modified_base 23: mod_base = OTHER; note = 2'-O-methylcytidine
  misc_feature 1: note = RNA
  misc_feature 3..4: note = RNA
  misc_feature 6: note = RNA
  misc_feature 8..11: note = RNA
  misc_feature 13..23: note = RNA
  misc_feature 2: note = DNA
  misc_feature 5: note = DNA
  misc_feature 7: note = DNA
  misc_feature 12: note = DNA
atcccgctgcgctctgcctgcac

SEQ ID NO: 771 - DNA, 23 bp, synthetic construct
  source 1..23: mol_type = other DNA
  modified_base 1: mod_base = OTHER; note = 2'-O-methyluridine-3'-phosphorothioate
  modified_base 2: mod_base = OTHER; note = 2'-deoxycytidine-3'-phosphorothioate
  modified_base 3: mod_base = OTHER; note = 2'-O-methylcytidine-3'-phosphate
  modified_base 4: mod_base = OTHER; note = 2'-O-methyladenosine-3'-phosphate
  modified_base 6: mod_base = OTHER; note = 2'-O-methylguanosine-3'-phosphate
  modified_base 8: mod_base = OTHER; note = 2'-O-methyladenosine-3'-phosphate
  modified_base 9: mod_base = OTHER; note = 2'-O-methylguanosine-3'-phosphate
  modified_base 10: mod_base = OTHER; note = 2'-O-methyladenosine-3'-phosphate
  modified_base 11: mod_base = OTHER; note = 2'-O-methyluridine-3'-phosphate
  modified_base 13: mod_base = OTHER; note = 2'-O-methyladenosine-3'-phosphate
  modified_base 14: mod_base = OTHER; note = 2'-deoxy-2'-fluorouridine-3'-phosphate
  modified_base 15: mod_base = OTHER; note = 2'-O-methylguanosine-3'-phosphate
  modified_base 16: mod_base = OTHER; note = 2'-O-methyladenosine-3'-phosphate
  modified_base 17: mod_base = OTHER; note = 2'-O-methylguanosine-3'-phosphate
  modified_base 18: mod_base = OTHER; note = 2'-O-methylguanosine-3'-phosphate
  modified_base 19: mod_base = OTHER; note = 2'-O-methylguanosine-3'-phosphate
  modified_base 20: mod_base = OTHER; note = 2'-O-methyluridine-3'-phosphate
  modified_base 21: mod_base = OTHER; note = 2'-O-methylguanosine-3'-phosphorothioate
  modified_base 22: mod_base = OTHER; note = 2'-O-methyluridine-3'-phosphorothioate
  modified_base 23: mod_base = OTHER; note = 2'-O-methyluridine
  misc_feature 1: note = RNA
  misc_feature 3..4: note = RNA
  misc_feature 6: note = RNA
  misc_feature 8..11: note = RNA
  misc_feature 13..23: note = RNA
  misc_feature 2: note = DNA
  misc_feature 5: note = DNA
  misc_feature 7: note = DNA
  misc_feature 12: note = DNA
tccaggtagatgatgagggtgtt

SEQ ID NO: 772 - DNA, 23 bp, synthetic construct
  source 1..23: mol_type = other DNA
  modified_base 1: mod_base = OTHER; note = 2'-O-methyladenosine-3'-phosphorothioate
  modified_base 2: mod_base = OTHER; note = 2'-deoxythymidine-3'-phosphorothioate
  modified_base 3: mod_base = OTHER; note = 2'-O-methylcytidine-3'-phosphate
  modified_base 4: mod_base = OTHER; note = 2'-O-methyluridine-3'-phosphate
  modified_base 6: mod_base = OTHER; note = 2'-O-methylguanosine-3'-phosphate
  modified_base 8: mod_base = OTHER; note = 2'-O-methyluridine-3'-phosphate
  modified_base 9: mod_base = OTHER; note = 2'-O-methylguanosine-3'-phosphate
  modified_base 10: mod_base = OTHER; note = 2'-O-methyladenosine-3'-phosphate
  modified_base 11: mod_base = OTHER; note = 2'-O-methyladenosine-3'-phosphate
  modified_base 13: mod_base = OTHER; note = 2'-O-methyluridine-3'-phosphate
  modified_base 14: mod_base = OTHER; note = 2'-deoxy-2'-fluoroguanosine-3'-phosphate
  modified_base 15: mod_base = OTHER; note = 2'-O-methylguanosine-3'-phosphate
  modified_base 16: mod_base = OTHER; note = 2'-O-methyladenosine-3'-phosphate
  modified_base 17: mod_base = OTHER; note = 2'-O-methyluridine-3'-phosphate
  modified_base 18: mod_base = OTHER; note = 2'-O-methylcytidine-3'-phosphate
  modified_base 19: mod_base = OTHER; note = 2'-O-methyluridine-3'-phosphate
  modified_base 20: mod_base = OTHER; note = 2'-O-methylguanosine-3'-phosphate
  modified_base 21: mod_base = OTHER; note = 2'-O-methylguanosine-3'-phosphorothioate
  modified_base 22: mod_base = OTHER; note = 2'-O-methyluridine-3'-phosphorothioate
  modified_base 23: mod_base = OTHER; note = 2'-O-methyladenosine
  misc_feature 1: note = RNA
  misc_feature 3..4: note = RNA
  misc_feature 6: note = RNA
  misc_feature 8..11: note = RNA
  misc_feature 13..23: note = RNA
  misc_feature 2: note = DNA
  misc_feature 5: note = DNA
  misc_feature 7: note = DNA
  misc_feature 12: note = DNA
atcttggtgaagtggatctggta

SEQ ID NO: 773 - DNA, 23 bp, synthetic construct
  source 1..23: mol_type = other DNA
  modified_base 1: mod_base = OTHER; note = 2'-O-methyluridine-3'-phosphorothioate
  modified_base 2: mod_base = OTHER; note = 2'-deoxyguanosine-3'-phosphorothioate
  modified_base 3: mod_base = OTHER; note = 2'-O-methyladenosine-3'-phosphate
  modified_base 4: mod_base = OTHER; note = 2'-O-methyluridine-3'-phosphate
  modified_base 6: mod_base = OTHER; note = 2'-O-methyluridine-3'-phosphate
  modified_base 8: mod_base = OTHER; note = 2'-O-methylcytidine-3'-phosphate
  modified_base 9: mod_base = OTHER; note = 2'-O-methylcytidine-3'-phosphate
  modified_base 10: mod_base = OTHER; note = 2'-O-methyladenosine-3'-phosphate
  modified_base 11: mod_base = OTHER; note = 2'-O-methylcytidine-3'-phosphate
  modified_base 13: mod_base = OTHER; note = 2'-O-methylguanosine-3'-phosphate
  modified_base 14: mod_base = OTHER; note = 2'-deoxy-2'-fluoroguanosine-3'-phosphate
  modified_base 15: mod_base = OTHER; note = 2'-O-methylcytidine-3'-phosphate
  modified_base 16: mod_base = OTHER; note = 2'-O-methylcytidine-3'-phosphate
  modified_base 17: mod_base = OTHER; note = 2'-O-methylcytidine-3'-phosphate
  modified_base 18: mod_base = OTHER; note = 2'-O-methyladenosine-3'-phosphate
  modified_base 19: mod_base = OTHER; note = 2'-O-methyluridine-3'-phosphate
  modified_base 20: mod_base = OTHER; note = 2'-O-methylguanosine-3'-phosphate
  modified_base 21: mod_base = OTHER; note = 2'-O-methyluridine-3'-phosphorothioate
  modified_base 22: mod_base = OTHER; note = 2'-O-methyluridine-3'-phosphorothioate
  modified_base 23: mod_base = OTHER; note = 2'-O-methylguanosine
  misc_feature 1: note = RNA
  misc_feature 3..4: note = RNA
  misc_feature 6: note = RNA
  misc_feature 8..11: note = RNA
  misc_feature 13..23: note = RNA
  misc_feature 2: note = DNA
  misc_feature 5: note = DNA
  misc_feature 7: note = DNA
  misc_feature 12: note = DNA
tgatcttccactggcccatgttg

SEQ ID NO: 774 - DNA, 23 bp, synthetic construct
  source 1..23: mol_type = other DNA
  modified_base 1: mod_base = OTHER; note = 2'-O-methyladenosine-3'-phosphorothioate
  modified_base 2: mod_base = OTHER; note = 2'-deoxyguanosine-3'-phosphorothioate
  modified_base 3: mod_base = OTHER; note = 2'-O-methyluridine-3'-phosphate
  modified_base 4: mod_base = OTHER; note = 2'-O-methyluridine-3'-phosphate
  modified_base 6: mod_base = OTHER; note = 2'-O-methyluridine-3'-phosphate
  modified_base 8: mod_base = OTHER; note = 2'-O-methyladenosine-3'-phosphate
  modified_base 9: mod_base = OTHER; note = 2'-O-methyluridine-3'-phosphate
  modified_base 10: mod_base = OTHER; note = 2'-O-methylcytidine-3'-phosphate
  modified_base 11: mod_base = OTHER; note = 2'-O-methyluridine-3'-phosphate
  modified_base 13: mod_base = OTHER; note = 2'-O-methyluridine-3'-phosphate
  modified_base 14: mod_base = OTHER; note = 2'-deoxy-2'-fluoroguanosine-3'-phosphate
  modified_base 15: mod_base = OTHER; note = 2'-O-methylguanosine-3'-phosphate
  modified_base 16: mod_base = OTHER; note = 2'-O-methylcytidine-3'-phosphate
  modified_base 17: mod_base = OTHER; note = 2'-O-methyluridine-3'-phosphate
  modified_base 18: mod_base = OTHER; note = 2'-O-methylguanosine-3'-phosphate
  modified_base 19: mod_base = OTHER; note = 2'-O-methyluridine-3'-phosphate
  modified_base 20: mod_base = OTHER; note = 2'-O-methylguanosine-3'-phosphate
  modified_base 21: mod_base = OTHER; note = 2'-O-methylguanosine-3'-phosphorothioate
  modified_base 22: mod_base = OTHER; note = 2'-O-methyluridine-3'-phosphorothioate
  modified_base 23: mod_base = OTHER; note = 2'-O-methylcytidine
  misc_feature 1: note = RNA
  misc_feature 3..4: note = RNA
  misc_feature 6: note = RNA
  misc_feature 8..11: note = RNA
  misc_feature 13..23: note = RNA
  misc_feature 2: note = DNA
  misc_feature 5: note = DNA
  misc_feature 7: note = DNA
  misc_feature 12: note = DNA
agttcttatctttggctgtggtc

SEQ ID NO: 775 - DNA, 23 bp, synthetic construct
  source 1..23: mol_type = other DNA
  modified_base 1: mod_base = OTHER; note = 2'-O-methyluridine-3'-phosphorothioate
  modified_base 2: mod_base = OTHER; note = 2'-deoxyguanosine-3'-phosphorothioate
  modified_base 3: mod_base = OTHER; note = 2'-O-methyladenosine-3'-phosphate
  modified_base 4: mod_base = OTHER; note = 2'-O-methylcytidine-3'-phosphate
  modified_base 6: mod_base = OTHER; note = 2'-O-methyladenosine-3'-phosphate
  modified_base 8: mod_base = OTHER; note = 2'-O-methyluridine-3'-phosphate
  modified_base 9: mod_base = OTHER; note = 2'-O-methylcytidine-3'-phosphate
  modified_base 10: mod_base = OTHER; note = 2'-O-methylguanosine-3'-phosphate
  modified_base 11: mod_base = OTHER; note = 2'-O-methylguanosine-3'-phosphate
  modified_base 13: mod_base = OTHER; note = 2'-O-methyluridine-3'-phosphate
  modified_base 14: mod_base = OTHER; note = 2'-deoxy-2'-fluorocytidine-3'-phosphate
  modified_base 15: mod_base = OTHER; note = 2'-O-methyluridine-3'-phosphate
  modified_base 16: mod_base = OTHER; note = 2'-O-methyluridine-3'-phosphate
  modified_base 17: mod_base = OTHER; note = 2'-O-methylguanosine-3'-phosphate
  modified_base 18: mod_base = OTHER; note = 2'-O-methyluridine-3'-phosphate
  modified_base 19: mod_base = OTHER; note = 2'-O-methyladenosine-3'-phosphate
  modified_base 20: mod_base = OTHER; note = 2'-O-methylcytidine-3'-phosphate
  modified_base 21: mod_base = OTHER; note = 2'-O-methyladenosine-3'-phosphorothioate
  modified_base 22: mod_base = OTHER; note = 2'-O-methylcytidine-3'-phosphorothioate
  modified_base 23: mod_base = OTHER; note = 2'-O-methyladenosine
  misc_feature 1: note = RNA
  misc_feature 3..4: note = RNA
  misc_feature 6: note = RNA
  misc_feature 8..11: note = RNA
  misc_feature 13..23: note = RNA
  misc_feature 2: note = DNA
  misc_feature 5: note = DNA
  misc_feature 7: note = DNA
  misc_feature 12: note = DNA
tgaccagtcgggtcttgtacaca

SEQ ID NO: 776 - DNA, 23 bp, synthetic construct
  source 1..23: mol_type = other DNA
  modified_base 1: mod_base = OTHER; note = 2'-O-methyluridine-3'-phosphorothioate
  modified_base 2: mod_base = OTHER; note = 2'-deoxycytidine-3'-phosphorothioate
  modified_base 3: mod_base = OTHER; note = 2'-O-methyluridine-3'-phosphate
  modified_base 4: mod_base = OTHER; note = 2'-O-methyladenosine-3'-phosphate
  modified_base 6: mod_base = OTHER; note = 2'-O-methylguanosine-3'-phosphate
  modified_base 8: mod_base = OTHER; note = 2'-O-methylcytidine-3'-phosphate
  modified_base 9: mod_base = OTHER; note = 2'-O-methylguanosine-3'-phosphate
  modified_base 10: mod_base = OTHER; note = 2'-O-methyladenosine-3'-phosphate
  modified_base 11: mod_base = OTHER; note = 2'-O-methyladenosine-3'-phosphate
  modified_base 13: mod_base = OTHER; note = 2'-O-methyluridine-3'-phosphate
  modified_base 14: mod_base = OTHER; note = 2'-deoxy-2'-fluorouridine-3'-phosphate
  modified_base 15: mod_base = OTHER; note = 2'-O-methylcytidine-3'-phosphate
  modified_base 16: mod_base = OTHER; note = 2'-O-methyluridine-3'-phosphate
  modified_base 17: mod_base = OTHER; note = 2'-O-methylcytidine-3'-phosphate
  modified_base 18: mod_base = OTHER; note = 2'-O-methylcytidine-3'-phosphate
  modified_base 19: mod_base = OTHER; note = 2'-O-methylcytidine-3'-phosphate
  modified_base 20: mod_base = OTHER; note = 2'-O-methyladenosine-3'-phosphate
  modified_base 21: mod_base = OTHER; note = 2'-O-methylcytidine-3'-phosphorothioate
  modified_base 22: mod_base = OTHER; note = 2'-O-methyluridine-3'-phosphorothioate
  modified_base 23: mod_base = OTHER; note = 2'-O-methylguanosine
  misc_feature 1: note = RNA
  misc_feature 3..4: note = RNA
  misc_feature 6: note = RNA
  misc_feature 8..11: note = RNA
  misc_feature 13..23: note = RNA
  misc_feature 2: note = DNA
  misc_feature 5: note = DNA
  misc_feature 7: note = DNA
  misc_feature 12: note = DNA
tctaggccgaacttctcccactg

SEQ ID NO: 777 - DNA, 23 bp, synthetic construct
  source 1..23: mol_type = other DNA
  modified_base 1: mod_base = OTHER; note = 2'-O-methyluridine-3'-phosphorothioate
  modified_base 2: mod_base = OTHER; note = 2'-deoxyguanosine-3'-phosphorothioate
  modified_base 3: mod_base = OTHER; note = 2'-O-methyladenosine-3'-phosphate
  modified_base 4: mod_base = OTHER; note = 2'-O-methyluridine-3'-phosphate
  modified_base 6: mod_base = OTHER; note = 2'-O-methyladenosine-3'-phosphate
  modified_base 8: mod_base = OTHER; note = 2'-O-methylguanosine-3'-phosphate
  modified_base 9: mod_base = OTHER; note = 2'-O-methyladenosine-3'-phosphate
  modified_base 10: mod_base = OTHER; note = 2'-O-methylguanosine-3'-phosphate
  modified_base 11: mod_base = OTHER; note = 2'-O-methylguanosine-3'-phosphate
  modified_base 13: mod_base = OTHER; note = 2'-O-methyladenosine-3'-phosphate
  modified_base 14: mod_base = OTHER; note = 2'-deoxy-2'-fluorocytidine-3'-phosphate
  modified_base 15: mod_base = OTHER; note = 2'-O-methylcytidine-3'-phosphate
  modified_base 16: mod_base = OTHER; note = 2'-O-methylcytidine-3'-phosphate
  modified_base 17: mod_base = OTHER; note = 2'-O-methylguanosine-3'-phosphate
  modified_base 18: mod_base = OTHER; note = 2'-O-methylcytidine-3'-phosphate
  modified_base 19: mod_base = OTHER; note = 2'-O-methyluridine-3'-phosphate
  modified_base 20: mod_base = OTHER; note = 2'-O-methylcytidine-3'-phosphate
  modified_base 21: mod_base = OTHER; note = 2'-O-methyluridine-3'-phosphorothioate
  modified_base 22: mod_base = OTHER; note = 2'-O-methylguanosine-3'-phosphorothioate
  modified_base 23: mod_base = OTHER; note = 2'-O-methylcytidine
  misc_feature 1: note = RNA
  misc_feature 3..4: note = RNA
  misc_feature 6: note = RNA
  misc_feature 8..11: note = RNA
  misc_feature 13..23: note = RNA
  misc_feature 2: note = DNA
  misc_feature 5: note = DNA
  misc_feature 7: note = DNA
  misc_feature 12: note = DNA
tgatgaagaggtacccgctctgc

SEQ ID NO: 778 - DNA, 23 bp, synthetic construct
  source 1..23: mol_type = other DNA
  modified_base 1: mod_base = OTHER; note = 2'-O-methyladenosine-3'-phosphorothioate
  modified_base 2: mod_base = OTHER; note = 2'-deoxythymidine-3'-phosphorothioate
  modified_base 3: mod_base = OTHER; note = 2'-O-methylguanosine-3'-phosphate
  modified_base 4: mod_base = OTHER; note = 2'-O-methyluridine-3'-phosphate
  modified_base 6: mod_base = OTHER; note = 2'-O-methyladenosine-3'-phosphate
  modified_base 8: mod_base = OTHER; note = 2'-O-methyladenosine-3'-phosphate
  modified_base 9: mod_base = OTHER; note = 2'-O-methylguanosine-3'-phosphate
  modified_base 10: mod_base = OTHER; note = 2'-O-methylguanosine-3'-phosphate
  modified_base 11: mod_base = OTHER; note = 2'-O-methylcytidine-3'-phosphate
  modified_base 13: mod_base = OTHER; note = 2'-O-methyluridine-3'-phosphate
  modified_base 14: mod_base = OTHER; note = 2'-deoxy-2'-fluoroadenosine-3'-phosphate
  modified_base 15: mod_base = OTHER; note = 2'-O-methylguanosine-3'-phosphate
  modified_base 16: mod_base = OTHER; note = 2'-O-methyladenosine-3'-phosphate
  modified_base 17: mod_base = OTHER; note = 2'-O-methylcytidine-3'-phosphate
  modified_base 18: mod_base = OTHER; note = 2'-O-methylcytidine-3'-phosphate
  modified_base 19: mod_base = OTHER; note = 2'-O-methyluridine-3'-phosphate
  modified_base 20: mod_base = OTHER; note = 2'-O-methyluridine-3'-phosphate
  modified_base 21: mod_base = OTHER; note = 2'-O-methylguanosine-3'-phosphorothioate
  modified_base 22: mod_base = OTHER; note = 2'-O-methyladenosine-3'-phosphorothioate
  modified_base 23: mod_base = OTHER; note = 2'-O-methylcytidine
  misc_feature 1: note = RNA
  misc_feature 3..4: note = RNA
  misc_feature 6: note = RNA
  misc_feature 8..11: note = RNA
  misc_feature 13..23: note = RNA
  misc_feature 2: note = DNA
  misc_feature 5: note = DNA
  misc_feature 7: note = DNA
  misc_feature 12: note = DNA
atgtaataggcgtagaccttgac

SEQ ID NO: 779 - DNA, 23 bp, synthetic construct
  source 1..23: mol_type = other DNA
  modified_base 1: mod_base = OTHER; note = 2'-O-methyladenosine-3'-phosphorothioate
  modified_base 2: mod_base = OTHER; note = 2'-deoxyadenosine-3'-phosphorothioate
  modified_base 3: mod_base = OTHER; note = 2'-O-methyluridine-3'-phosphate
  modified_base 4: mod_base = OTHER; note = 2'-O-methylguanosine-3'-phosphate
  modified_base 6: mod_base = OTHER; note = 2'-O-methyladenosine-3'-phosphate
  modified_base 8: mod_base = OTHER; note = 2'-O-methylcytidine-3'-phosphate
  modified_base 9: mod_base = OTHER; note = 2'-O-methyladenosine-3'-phosphate
  modified_base 10: mod_base = OTHER; note = 2'-O-methyladenosine-3'-phosphate
  modified_base 11: mod_base = OTHER; note = 2'-O-methyluridine-3'-phosphate
  modified_base 13: mod_base = OTHER; note = 2'-O-methylcytidine-3'-phosphate
  modified_base 14: mod_base = OTHER; note = 2'-deoxy-2'-fluorouridine-3'-phosphate
  modified_base 15: mod_base = OTHER; note = 2'-O-methylcytidine-3'-phosphate
  modified_base 16: mod_base = OTHER; note = 2'-O-methylcytidine-3'-phosphate
  modified_base 17: mod_base = OTHER; note = 2'-O-methyluridine-3'-phosphate
  modified_base 18: mod_base = OTHER; note = 2'-O-methylcytidine-3'-phosphate
  modified_base 19: mod_base = OTHER; note = 2'-O-methyladenosine-3'-phosphate
  modified_base 20: mod_base = OTHER; note = 2'-O-methylguanosine-3'-phosphate
  modified_base 21: mod_base = OTHER; note = 2'-O-methylcytidine-3'-phosphorothioate
  modified_base 22: mod_base = OTHER; note = 2'-O-methyladenosine-3'-phosphorothioate
  modified_base 23: mod_base = OTHER; note = 2'-O-methylcytidine
  misc_feature 1: note = RNA
  misc_feature 3..4: note = RNA
  misc_feature 6: note = RNA
  misc_feature 8..11: note = RNA
  misc_feature 13..23: note = RNA
  misc_feature 2: note = DNA
  misc_feature 5: note = DNA
  misc_feature 7: note = DNA
  misc_feature 12: note = DNA
aatgaagcaattctcctcagcac

SEQ ID NO: 780 - RNA, 23 nt, synthetic construct
  source 1..23: mol_type = other RNA
  modified_base 1: mod_base = OTHER; note = 2'-O-methyladenosine-3'-phosphorothioate
  modified_base 2: mod_base = OTHER; note = 2'-deoxy-2'-fluorocytidine-3'-phosphorothioate
  modified_base 3: mod_base = OTHER; note = 2'-O-methyluridine-3'-phosphate
  modified_base 4: mod_base = OTHER; note = 2'-O-methylguanosine-3'-phosphate
  modified_base 5: mod_base = OTHER; note = 2'-O-methyluridine-3'-phosphate
  modified_base 6: mod_base = OTHER; note = 2'-deoxy-2'-fluorocytidine-3'-phosphate
  modified_base 7: mod_base = OTHER; note = 2'-O-methyluridine-3'-phosphate
  modified_base 8: mod_base = OTHER; note = 2'-deoxy-2'-fluoroguanosine-3'-phosphate
  modified_base 9: mod_base = OTHER; note = 2'-deoxy-2'-fluoroguanosine-3'-phosphate
  modified_base 10: mod_base = OTHER; note = 2'-O-methyladenosine-3'-phosphate
  modified_base 11: mod_base = OTHER; note = 2'-O-methyluridine-3'-phosphate
  modified_base 12: mod_base = OTHER; note = 2'-O-methylguanosine-3'-phosphate
  modified_base 13: mod_base = OTHER; note = 2'-O-methyladenosine-3'-phosphate
  modified_base 14: mod_base = OTHER; note = 2'-deoxy-2'-fluoroadenosine-3'-phosphate
  modified_base 15: mod_base = OTHER; note = 2'-O-methylguanosine-3'-phosphate
  modified_base 16: mod_base = OTHER; note = 2'-deoxy-2'-fluoroadenosine-3'-phosphate
  modified_base 17: mod_base = OTHER; note = 2'-O-methylguanosine-3'-phosphate
  modified_base 18: mod_base = OTHER; note = 2'-O-methylguanosine-3'-phosphate
  modified_base 19: mod_base = OTHER; note = 2'-O-methyluridine-3'-phosphate
  modified_base 20: mod_base = OTHER; note = 2'-O-methyladenosine-3'-phosphate
  modified_base 21: mod_base = OTHER; note = 2'-O-methylcytidine-3'-phosphorothioate
  modified_base 22: mod_base = OTHER; note = 2'-O-methylcytidine-3'-phosphorothioate
  modified_base 23: mod_base = OTHER; note = 2'-O-methylcytidine
actgtctggatgaagaggtaccc

SEQ ID NO: 781 - RNA, 23 nt, synthetic construct
  source 1..23: mol_type = other RNA
  modified_base 1: mod_base = OTHER; note = 2'-O-methyladenosine-3'-phosphorothioate
  modified_base 2: mod_base = OTHER; note = 2'-deoxy-2'-fluorouridine-3'-phosphorothioate
  modified_base 3: mod_base = OTHER; note = 2'-O-methylguanosine-3'-phosphate
  modified_base 4: mod_base = OTHER; note = 2'-O-methyluridine-3'-phosphate
  modified_base 5: mod_base = OTHER; note = 2'-O-methyladenosine-3'-phosphate
  modified_base 6: mod_base = OTHER; note = 2'-deoxy-2'-fluoroguanosine-3'-phosphate
  modified_base 7: mod_base = OTHER; note = 2'-O-methyladenosine-3'-phosphate
  modified_base 8: mod_base = OTHER; note = 2'-deoxy-2'-fluorouridine-3'-phosphate
  modified_base 9: mod_base = OTHER; note = 2'-deoxy-2'-fluoroguanosine-3'-phosphate
  modified_base 10: mod_base = OTHER; note = 2'-O-methylguanosine-3'-phosphate
  modified_base 11: mod_base = OTHER; note = 2'-O-methyluridine-3'-phosphate
  modified_base 12: mod_base = OTHER; note = 2'-O-methylcytidine-3'-phosphate
  modified_base 13: mod_base = OTHER; note = 2'-O-methyluridine-3'-phosphate
  modified_base 14: mod_base = OTHER; note = 2'-deoxy-2'-fluorouridine-3'-phosphate
  modified_base 15: mod_base = OTHER; note = 2'-O-methylguanosine-3'-phosphate
  modified_base 16: mod_base = OTHER; note = 2'-deoxy-2'-fluorouridine-3'-phosphate
  modified_base 17: mod_base = OTHER; note = 2'-O-methylcytidine-3'-phosphate
  modified_base 18: mod_base = OTHER; note = 2'-O-methyluridine-3'-phosphate
  modified_base 19: mod_base = OTHER; note = 2'-O-methylguanosine-3'-phosphate
  modified_base 20: mod_base = OTHER; note = 2'-O-methyluridine-3'-phosphate
  modified_base 21: mod_base = OTHER; note = 2'-O-methylcytidine-3'-phosphorothioate
  modified_base 22: mod_base = OTHER; note = 2'-O-methyluridine-3'-phosphorothioate
  modified_base 23: mod_base = OTHER; note = 2'-O-methylguanosine
atgtagatggtcttgtctgtctg

SEQ ID NO: 782 - RNA, 23 nt, synthetic construct
  source 1..23: mol_type = other RNA
  modified_base 1: mod_base = OTHER; note = 2'-O-methyladenosine-3'-phosphorothioate
  modified_base 2: mod_base = OTHER; note = 2'-deoxy-2'-fluorouridine-3'-phosphorothioate
  modified_base 3: mod_base = OTHER; note = 2'-O-methylguanosine-3'-phosphate
  modified_base 4: mod_base = OTHER; note = 2'-O-methylcytidine-3'-phosphate
  modified_base 5: mod_base = OTHER; note = 2'-O-methylcytidine-3'-phosphate
  modified_base 6: mod_base = OTHER; note = 2'-deoxy-2'-fluorouridine-3'-phosphate
  modified_base 7: mod_base = OTHER; note = 2'-O-methyluridine-3'-phosphate
  modified_base 8: mod_base = OTHER; note = 2'-deoxy-2'-fluorocytidine-3'-phosphate
  modified_base 9: mod_base = OTHER; note = 2'-deoxy-2'-fluorocytidine-3'-phosphate
  modified_base 10: mod_base = OTHER; note = 2'-O-methylguanosine-3'-phosphate
  modified_base 11: mod_base = OTHER; note = 2'-O-methylguanosine-3'-phosphate
  modified_base 12: mod_base = OTHER; note = 2'-O-methylguanosine-3'-phosphate
  modified_base 13: mod_base = OTHER; note = 2'-O-methyluridine-3'-phosphate
  modified_base 14: mod_base = OTHER; note = 2'-deoxy-2'-fluorouridine-3'-phosphate
  modified_base 15: mod_base = OTHER; note = 2'-O-methylcytidine-3'-phosphate
  modified_base 16: mod_base = OTHER; note = 2'-deoxy-2'-fluorouridine-3'-phosphate
  modified_base 17: mod_base = OTHER; note = 2'-O-methylcytidine-3'-phosphate
  modified_base 18: mod_base = OTHER; note = 2'-O-methyladenosine-3'-phosphate
  modified_base 19: mod_base = OTHER; note = 2'-O-methyladenosine-3'-phosphate
  modified_base 20: mod_base = OTHER; note = 2'-O-methyluridine-3'-phosphate
  modified_base 21: mod_base = OTHER; note = 2'-O-methylguanosine-3'-phosphorothioate
  modified_base 22: mod_base = OTHER; note = 2'-O-methyluridine-3'-phosphorothioate
  modified_base 23: mod_base = OTHER; note = 2'-O-methyluridine
atgccttccgggttctcaatgtt

SEQ ID NO: 783 - RNA, 23 nt, synthetic construct
  source 1..23: mol_type = other RNA
  modified_base 1: mod_base = OTHER; note = 2'-O-methyladenosine-3'-phosphorothioate
  modified_base 2: mod_base = OTHER; note = 2'-deoxy-2'-fluoroguanosine-3'-phosphorothioate
  modified_base 3: mod_base = OTHER; note = 2'-O-methyladenosine-3'-phosphate
  modified_base 4: mod_base = OTHER; note = 2'-O-methyluridine-3'-phosphate
  modified_base 5: mod_base = OTHER; note = 2'-O-methylguanosine-3'-phosphate
  modified_base 6: mod_base = OTHER; note = 2'-deoxy-2'-fluorouridine-3'-phosphate
  modified_base 7: mod_base = OTHER; note = 2'-O-methyladenosine-3'-phosphate
  modified_base 8: mod_base = OTHER; note = 2'-deoxy-2'-fluoroguanosine-3'-phosphate
  modified_base 9: mod_base = OTHER; note = 2'-deoxy-2'-fluorouridine-3'-phosphate
  modified_base 10: mod_base = OTHER; note = 2'-O-methyladenosine-3'-phosphate
  modified_base 11: mod_base = OTHER; note = 2'-O-methylguanosine-3'-phosphate
  modified_base 12: mod_base = OTHER; note = 2'-O-methyladenosine-3'-phosphate
  modified_base 13: mod_base = OTHER; note = 2'-O-methyladenosine-3'-phosphate
  modified_base 14: mod_base = OTHER; note = 2'-deoxy-2'-fluorouridine-3'-phosphate
  modified_base 15: mod_base = OTHER; note = 2'-O-methyluridine-3'-phosphate
  modified_base 16: mod_base = OTHER; note = 2'-deoxy-2'-fluorouridine-3'-phosphate
  modified_base 17: mod_base = OTHER; note = 2'-O-methylcytidine-3'-phosphate
  modified_base 18: mod_base = OTHER; note = 2'-O-methyluridine-3'-phosphate
  modified_base 19: mod_base = OTHER; note = 2'-O-methylcytidine-3'-phosphate
  modified_base 20: mod_base = OTHER; note = 2'-O-methyluridine-3'-phosphate
  modified_base 21: mod_base = OTHER; note = 2'-O-methylguanosine-3'-phosphorothioate
  modified_base 22: mod_base = OTHER; note = 2'-O-methyluridine-3'-phosphorothioate
  modified_base 23: mod_base = OTHER; note = 2'-O-methyladenosine
agatgtagtagaatttctctgta

SEQ ID NO: 784 - RNA, 23 nt, synthetic construct
  source 1..23: mol_type = other RNA
  modified_base 1: mod_base = OTHER; note = 2'-O-methyladenosine-3'-phosphorothioate
  modified_base 2: mod_base = OTHER; note = 2'-deoxy-2'-fluorouridine-3'-phosphorothioate
  modified_base 3: mod_base = OTHER; note = 2'-O-methyladenosine-3'-phosphate
  modified_base 4: mod_base = OTHER; note = 2'-O-methylguanosine-3'-phosphate
  modified_base 5: mod_base = OTHER; note = 2'-O-methyladenosine-3'-phosphate
  modified_base 6: mod_base = OTHER; note = 2'-deoxy-2'-fluorouridine-3'-phosphate
  modified_base 7: mod_base = OTHER; note = 2'-O-methylguanosine-3'-phosphate
  modified_base 8: mod_base = OTHER; note = 2'-deoxy-2'-fluorouridine-3'-phosphate
  modified_base 9: mod_base = OTHER; note = 2'-deoxy-2'-fluoroadenosine-3'-phosphate
  modified_base 10: mod_base = OTHER; note = 2'-O-methylguanosine-3'-phosphate
  modified_base 11: mod_base = OTHER; note = 2'-O-methyluridine-3'-phosphate
  modified_base 12: mod_base = OTHER; note = 2'-O-methyladenosine-3'-phosphate
  modified_base 13: mod_base = OTHER; note = 2'-O-methylguanosine-3'-phosphate
  modified_base 14: mod_base = OTHER; note = 2'-deoxy-2'-fluoroadenosine-3'-phosphate
  modified_base 15: mod_base = OTHER; note = 2'-O-methyladenosine-3'-phosphate
  modified_base 16: mod_base = OTHER; note = 2'-deoxy-2'-fluorouridine-3'-phosphate
  modified_base 17: mod_base = OTHER; note = 2'-O-methyluridine-3'-phosphate
  modified_base 18: mod_base = OTHER; note = 2'-O-methyluridine-3'-phosphate
  modified_base 19: mod_base = OTHER; note = 2'-O-methylcytidine-3'-phosphate
  modified_base 20: mod_base = OTHER; note = 2'-O-methyluridine-3'-phosphate
  modified_base 21: mod_base = OTHER; note = 2'-O-methylcytidine-3'-phosphorothioate
  modified_base 22: mod_base = OTHER; note = 2'-O-methyluridine-3'-phosphorothioate
  modified_base 23: mod_base = OTHER; note = 2'-O-methylguanosine
atagatgtagtagaatttctctg

SEQ ID NO: 785 - RNA, 23 nt, synthetic construct
  source 1..23: mol_type = other RNA
  modified_base 1: mod_base = OTHER; note = 2'-O-methyladenosine-3'-phosphorothioate
  modified_base 2: mod_base = OTHER; note = 2'-deoxy-2'-fluoroadenosine-3'-phosphorothioate
  modified_base 3: mod_base = OTHER; note = 2'-O-methyluridine-3'-phosphate
  modified_base 4: mod_base = OTHER; note = 2'-O-methyladenosine-3'-phosphate
  modified_base 5: mod_base = OTHER; note = 2'-O-methylguanosine-3'-phosphate
  modified_base 6: mod_base = OTHER; note = 2'-deoxy-2'-fluoroadenosine-3'-phosphate
  modified_base 7: mod_base = OTHER; note = 2'-O-methyluridine-3'-phosphate
  modified_base 8: mod_base = OTHER; note = 2'-deoxy-2'-fluoroguanosine-3'-phosphate
  modified_base 9: mod_base = OTHER; note = 2'-deoxy-2'-fluorouridine-3'-phosphate
  modified_base 10: mod_base = OTHER; note = 2'-O-methyladenosine-3'-phosphate
  modified_base 11: mod_base = OTHER; note = 2'-O-methylguanosine-3'-phosphate
  modified_base 12: mod_base = OTHER; note = 2'-O-methyluridine-3'-phosphate
  modified_base 13: mod_base = OTHER; note = 2'-O-methyladenosine-3'-phosphate
  modified_base 14: mod_base = OTHER; note = 2'-deoxy-2'-fluoroguanosine-3'-phosphate
  modified_base 15: mod_base = OTHER; note = 2'-O-methyladenosine-3'-phosphate
  modified_base 16: mod_base = OTHER; note = 2'-deoxy-2'-fluoroadenosine-3'-phosphate
  modified_base 17: mod_base = OTHER; note = 2'-O-methyluridine-3'-phosphate
  modified_base 18: mod_base = OTHER; note = 2'-O-methyluridine-3'-phosphate
  modified_base 19: mod_base = OTHER; note = 2'-O-methyluridine-3'-phosphate
  modified_base 20: mod_base = OTHER; note = 2'-O-methylcytidine-3'-phosphate
  modified_base 21: mod_base = OTHER; note = 2'-O-methyluridine-3'-phosphorothioate
  modified_base 22: mod_base = OTHER; note = 2'-O-methylcytidine-3'-phosphorothioate
  modified_base 23: mod_base = OTHER; note = 2'-O-methyluridine
aatagatgtagtagaatttctct

SEQ ID NO: 786 - RNA, 23 nt, synthetic construct
  source 1..23: mol_type = other RNA
  modified_base 1: mod_base = OTHER; note = 2'-O-methyladenosine-3'-phosphorothioate
  modified_base 2: mod_base = OTHER; note = 2'-deoxy-2'-fluorouridine-3'-phosphorothioate
  modified_base 3: mod_base = OTHER; note = 2'-O-methylcytidine-3'-phosphate
  modified_base 4: mod_base = OTHER; note = 2'-O-methylcytidine-3'-phosphate
  modified_base 5: mod_base = OTHER; note = 2'-O-methylcytidine-3'-phosphate
  modified_base 6: mod_base = OTHER; note = 2'-deoxy-2'-fluoroguanosine-3'-phosphate
  modified_base 7: mod_base = OTHER; note = 2'-O-methylcytidine-3'-phosphate
  modified_base 8: mod_base = OTHER; note = 2'-deoxy-2'-fluorouridine-3'-phosphate
  modified_base 9: mod_base = OTHER; note = 2'-deoxy-2'-fluoroguanosine-3'-phosphate
  modified_base 10: mod_base = OTHER; note = 2'-O-methylcytidine-3'-phosphate
  modified_base 11: mod_base = OTHER; note = 2'-O-methylguanosine-3'-phosphate
  modified_base 12: mod_base = OTHER; note = 2'-O-methylcytidine-3'-phosphate
  modified_base 13: mod_base = OTHER; note = 2'-O-methyluridine-3'-phosphate
  modified_base 14: mod_base = OTHER; note = 2'-deoxy-2'-fluorocytidine-3'-phosphate
  modified_base 15: mod_base = OTHER; note = 2'-O-methyluridine-3'-phosphate
  modified_base 16: mod_base = OTHER; note = 2'-deoxy-2'-fluoroguanosine-3'-phosphate
  modified_base 17: mod_base = OTHER; note = 2'-O-methylcytidine-3'-phosphate
  modified_base 18: mod_base = OTHER; note = 2'-O-methylcytidine-3'-phosphate
  modified_base 19: mod_base = OTHER; note = 2'-O-methyluridine-3'-phosphate
  modified_base 20: mod_base = OTHER; note = 2'-O-methylguanosine-3'-phosphate
  modified_base 21: mod_base = OTHER; note = 2'-O-methylcytidine-3'-phosphorothioate
  modified_base 22: mod_base = OTHER; note = 2'-O-methyladenosine-3'-phosphorothioate
  modified_base 23: mod_base = OTHER; note = 2'-O-methylcytidine
atcccgctgcgctctgcctgcac

SEQ ID NO: 787 - RNA, 23 nt, synthetic construct
  source 1..23: mol_type = other RNA
  modified_base 1: mod_base = OTHER; note = 2'-O-methyladenosine-3'-phosphorothioate
  modified_base 2: mod_base = OTHER; note = 2'-deoxy-2'-fluorouridine-3'-phosphorothioate
  modified_base 3: mod_base = OTHER; note = 2'-O-methylcytidine-3'-phosphate
  modified_base 4: mod_base = OTHER; note = 2'-O-methyluridine-3'-phosphate
  modified_base 5: mod_base = OTHER; note = 2'-O-methyluridine-3'-phosphate
  modified_base 6: mod_base = OTHER; note = 2'-deoxy-2'-fluoroguanosine-3'-phosphate
  modified_base 7: mod_base = OTHER; note = 2'-O-methylguanosine-3'-phosphate
  modified_base 8: mod_base = OTHER; note = 2'-deoxy-2'-fluorouridine-3'-phosphate
  modified_base 9: mod_base = OTHER; note = 2'-deoxy-2'-fluoroguanosine-3'-phosphate
  modified_base 10: mod_base = OTHER; note = 2'-O-methyladenosine-3'-phosphate
  modified_base 11: mod_base = OTHER; note = 2'-O-methyladenosine-3'-phosphate
  modified_base 12: mod_base = OTHER; note = 2'-O-methylguanosine-3'-phosphate
  modified_base 13: mod_base = OTHER; note = 2'-O-methyluridine-3'-phosphate
  modified_base 14: mod_base = OTHER; note = 2'-deoxy-2'-fluoroguanosine-3'-phosphate
  modified_base 15: mod_base = OTHER; note = 2'-O-methylguanosine-3'-phosphate
  modified_base 16: mod_base = OTHER; note = 2'-deoxy-2'-fluoroadenosine-3'-phosphate
  modified_base 17: mod_base = OTHER; note = 2'-O-methyluridine-3'-phosphate
  modified_base 18: mod_base = OTHER; note = 2'-O-methylcytidine-3'-phosphate
  modified_base 19: mod_base = OTHER; note = 2'-O-methyluridine-3'-phosphate
  modified_base 20: mod_base = OTHER; note = 2'-O-methylguanosine-3'-phosphate
  modified_base 21: mod_base = OTHER; note = 2'-O-methylguanosine-3'-phosphorothioate
  modified_base 22: mod_base = OTHER; note = 2'-O-methyluridine-3'-phosphorothioate
  modified_base 23: mod_base = OTHER; note = 2'-O-methyladenosine
atcttggtgaagtggatctggta

SEQ ID NO: 788 - RNA, 23 nt, synthetic construct
  source 1..23: mol_type = other RNA
  modified_base 1: mod_base = OTHER; note = 2'-O-methyladenosine-3'-phosphorothioate
  modified_base 2: mod_base = OTHER; note = 2'-deoxy-2'-fluoroguanosine-3'-phosphorothioate
  modified_base 3: mod_base = OTHER; note = 2'-O-methyluridine-3'-phosphate
  modified_base 4: mod_base = OTHER; note = 2'-O-methyladenosine-3'-phosphate
  modified_base 5: mod_base = OTHER; note = 2'-O-methyladenosine-3'-phosphate
  modified_base 6: mod_base = OTHER; note = 2'-deoxy-2'-fluorouridine-3'-phosphate
  modified_base 7: mod_base = OTHER; note = 2'-O-methyluridine-3'-phosphate
  modified_base 8: mod_base = OTHER; note = 2'-deoxy-2'-fluoroguanosine-3'-phosphate
  modified_base 9: mod_base = OTHER; note = 2'-deoxy-2'-fluorouridine-3'-phosphate
  modified_base 10: mod_base = OTHER; note = 2'-O-methyluridine-3'-phosphate
  modified_base 11: mod_base = OTHER; note = 2'-O-methylguanosine-3'-phosphate
  modified_base 12: mod_base = OTHER; note = 2'-O-methylguanosine-3'-phosphate
  modified_base 13: mod_base = OTHER; note = 2'-O-methyladenosine-3'-phosphate
  modified_base 14: mod_base = OTHER; note = 2'-deoxy-2'-fluoroguanosine-3'-phosphate
  modified_base 15: mod_base = OTHER; note = 2'-O-methyluridine-3'-phosphate
  modified_base 16: mod_base = OTHER; note = 2'-deoxy-2'-fluorouridine-3'-phosphate
  modified_base 17: mod_base = OTHER; note = 2'-O-methylguanosine-3'-phosphate
  modified_base 18: mod_base = OTHER; note = 2'-O-methylcytidine-3'-phosphate
  modified_base 19: mod_base = OTHER; note = 2'-O-methylcytidine-3'-phosphate
  modified_base 20: mod_base = OTHER; note = 2'-O-methylcytidine-3'-phosphate
  modified_base 21: mod_base = OTHER; note = 2'-O-methyladenosine-3'-phosphorothioate
  modified_base 22: mod_base = OTHER; note = 2'-O-methylcytidine-3'-phosphorothioate
  modified_base 23: mod_base = OTHER; note = 2'-O-methylguanosine
agtaattgttggagttgcccacg

SEQ ID NO: 789 - RNA, 23 nt, synthetic construct
  source 1..23: mol_type = other RNA
  modified_base 1: mod_base = OTHER; note = 2'-O-methyladenosine-3'-phosphorothioate
  modified_base 2: mod_base = OTHER; note = 2'-deoxy-2'-fluorocytidine-3'-phosphorothioate
  modified_base 3: mod_base = OTHER; note = 2'-O-methyluridine-3'-phosphate
  modified_base 4: mod_base = OTHER; note = 2'-O-methyluridine-3'-phosphate
  modified_base 5: mod_base = OTHER; note = 2'-O-methylcytidine-3'-phosphate
  modified_base 6: mod_base = OTHER; note = 2'-deoxy-2'-fluorouridine-3'-phosphate
  modified_base 7: mod_base = OTHER; note = 2'-O-methyluridine-3'-phosphate
  modified_base 8: mod_base = OTHER; note = 2'-deoxy-2'-fluoroadenosine-3'-phosphate
  modified_base 9: mod_base = OTHER; note = 2'-deoxy-2'-fluorouridine-3'-phosphate
  modified_base 10: mod_base = OTHER; note = 2'-O-methyluridine-3'-phosphate
  modified_base 11: mod_base = OTHER; note = 2'-O-methylcytidine-3'-phosphate
  modified_base 12: mod_base = OTHER; note = 2'-O-methyladenosine-3'-phosphate
  modified_base 13: mod_base = OTHER; note = 2'-O-methylguanosine-3'-phosphate
  modified_base 14: mod_base = OTHER; note = 2'-deoxy-2'-fluorocytidine-3'-phosphate
  modified_base 15: mod_base = OTHER; note = 2'-O-methyladenosine-3'-phosphate
  modified_base 16: mod_base = OTHER; note = 2'-deoxy-2'-fluorocytidine-3'-phosphate
  modified_base 17: mod_base = OTHER; note = 2'-O-methylguanosine-3'-phosphate
  modified_base 18: mod_base = OTHER; note = 2'-O-methyladenosine-3'-phosphate
  modified_base 19: mod_base = OTHER; note = 2'-O-methyladenosine-3'-phosphate
  modified_base 20: mod_base = OTHER; note = 2'-O-methylcytidine-3'-phosphate
  modified_base 21: mod_base = OTHER; note = 2'-O-methyladenosine-3'-phosphorothioate
  modified_base 22: mod_base = OTHER; note = 2'-O-methylcytidine-3'-phosphorothioate
  modified_base 23: mod_base = OTHER; note = 2'-O-methylguanosine
acttcttattcagcacgaacacg

SEQ ID NO: 790 - RNA, 23 nt, synthetic construct
  source 1..23: mol_type = other RNA
  modified_base 1: mod_base = OTHER; note = 2'-O-methyladenosine-3'-phosphorothioate
  modified_base 2: mod_base = OTHER; note = 2'-deoxy-2'-fluorouridine-3'-phosphorothioate
  modified_base 3: mod_base = OTHER; note = 2'-O-methyluridine-3'-phosphate
  modified_base 4: mod_base = OTHER; note = 2'-O-methylcytidine-3'-phosphate
  modified_base 5: mod_base = OTHER; note = 2'-O-methyluridine-3'-phosphate
  modified_base 6: mod_base = OTHER; note = 2'-deoxy-2'-fluorouridine-3'-phosphate
  modified_base 7: mod_base = OTHER; note = 2'-O-methylcytidine-3'-phosphate
  modified_base 8: mod_base = OTHER; note = 2'-deoxy-2'-fluorouridine-3'-phosphate
  modified_base 9: mod_base = OTHER; note = 2'-deoxy-2'-fluorouridine-3'-phosphate
  modified_base 10: mod_base = OTHER; note = 2'-O-methyladenosine-3'-phosphate
  modified_base 11: mod_base = OTHER; note = 2'-O-methyluridine-3'-phosphate
  modified_base 12: mod_base = OTHER; note = 2'-O-methyluridine-3'-phosphate
  modified_base 13: mod_base = OTHER; note = 2'-O-methylcytidine-3'-phosphate
  modified_base 14: mod_base = OTHER; note = 2'-deoxy-2'-fluoroadenosine-3'-phosphate
  modified_base 15: mod_base = OTHER; note = 2'-O-methylguanosine-3'-phosphate
  modified_base 16: mod_base = OTHER; note = 2'-deoxy-2'-fluorocytidine-3'-phosphate
  modified_base 17: mod_base = OTHER; note = 2'-O-methyladenosine-3'-phosphate
  modified_base 18: mod_base = OTHER; note = 2'-O-methylcytidine-3'-phosphate
  modified_base 19: mod_base = OTHER; note = 2'-O-methylguanosine-3'-phosphate
  modified_base 20: mod_base = OTHER; note = 2'-O-methyladenosine-3'-phosphate
  modified_base 21: mod_base = OTHER; note = 2'-O-methyladenosine-3'-phosphorothioate
  modified_base 22: mod_base = OTHER; note = 2'-O-methylcytidine-3'-phosphorothioate
  modified_base 23: mod_base = OTHER; note = 2'-O-methyladenosine
attcttcttattcagcacgaaca

SEQ ID NO: 791 - RNA, 23 nt, synthetic construct
  source 1..23: mol_type = other RNA
  modified_base 1: mod_base = OTHER; note = 2'-O-methyladenosine-3'-phosphorothioate
  modified_base 2: mod_base = OTHER; note = 2'-deoxy-2'-fluoroadenosine-3'-phosphorothioate
  modified_base 3: mod_base = OTHER; note = 2'-O-methyluridine-3'-phosphate
  modified_base 4: mod_base = OTHER; note = 2'-O-methylguanosine-3'-phosphate
  modified_base 5: mod_base = OTHER; note = 2'-O-methyladenosine-3'-phosphate
  modified_base 6: mod_base = OTHER; note = 2'-deoxy-2'-fluoroadenosine-3'-phosphate
  modified_base 7: mod_base = OTHER; note = 2'-O-methylguanosine-3'-phosphate
  modified_base 8: mod_base = OTHER; note = 2'-deoxy-2'-fluoroadenosine-3'-phosphate
  modified_base 9: mod_base = OTHER; note = 2'-deoxy-2'-fluoroadenosine-3'-phosphate
  modified_base 10: mod_base = OTHER; note = 2'-O-methylguanosine-3'-phosphate
  modified_base 11: mod_base = OTHER; note = 2'-O-methyluridine-3'-phosphate
  modified_base 12: mod_base = OTHER; note = 2'-O-methylcytidine-3'-phosphate
  modified_base 13: mod_base = OTHER; note = 2'-O-methylcytidine-3'-phosphate
  modified_base 14: mod_base = OTHER; note = 2'-deoxy-2'-fluorouridine-3'-phosphate
  modified_base 15: mod_base = OTHER; note = 2'-O-methylguanosine-3'-phosphate
  modified_base 16: mod_base = OTHER; note = 2'-deoxy-2'-fluorocytidine-3'-phosphate
  modified_base 17: mod_base = OTHER; note = 2'-O-methyladenosine-3'-phosphate
  modified_base 18: mod_base = OTHER; note = 2'-O-methyluridine-3'-phosphate
  modified_base 19: mod_base = OTHER; note = 2'-O-methyluridine-3'-phosphate
  modified_base 20: mod_base = OTHER; note = 2'-O-methyladenosine-3'-phosphate
  modified_base 21: mod_base = OTHER; note = 2'-O-methylcytidine-3'-phosphorothioate
  modified_base 22: mod_base = OTHER; note = 2'-O-methyluridine-3'-phosphorothioate
  modified_base 23: mod_base = OTHER; note = 2'-O-methylguanosine
aatgaagaagtcctgcattactg

SEQ ID NO: 792 - RNA, 23 nt, synthetic construct
  source 1..23: mol_type = other RNA
  modified_base 1: mod_base = OTHER; note = 2'-O-methyladenosine-3'-phosphorothioate
  modified_base 2: mod_base = OTHER; note = 2'-deoxy-2'-fluoroadenosine-3'-phosphorothioate
  modified_base 3: mod_base = OTHER; note = 2'-O-methyladenosine-3'-phosphate
  modified_base 4: mod_base = OTHER; note = 2'-O-methyluridine-3'-phosphate
  modified_base 5: mod_base = OTHER; note = 2'-O-methyluridine-3'-phosphate
  modified_base 6: mod_base = OTHER; note = 2'-deoxy-2'-fluoroguanosine-3'-phosphate
  modified_base 7: mod_base = OTHER; note = 2'-O-methyluridine-3'-phosphate
  modified_base 8: mod_base = OTHER; note = 2'-deoxy-2'-fluoroadenosine-3'-phosphate
  modified_base 9: mod_base = OTHER; note = 2'-deoxy-2'-fluoroguanosine-3'-phosphate
  modified_base 10: mod_base = OTHER; note = 2'-O-methyladenosine-3'-phosphate
  modified_base 11: mod_base = OTHER; note = 2'-O-methylguanosine-3'-phosphate
  modified_base 12: mod_base = OTHER; note = 2'-O-methyladenosine-3'-phosphate
  modified_base 13: mod_base = OTHER; note = 2'-O-methyladenosine-3'-phosphate
  modified_base 14: mod_base = OTHER; note = 2'-deoxy-2'-fluorocytidine-3'-phosphate
  modified_base 15: mod_base = OTHER; note = 2'-O-methylguanosine-3'-phosphate
  modified_base 16: mod_base = OTHER; note = 2'-deoxy-2'-fluoroguanosine-3'-phosphate
  modified_base 17: mod_base = OTHER; note = 2'-O-methylcytidine-3'-phosphate
  modified_base 18: mod_base = OTHER; note = 2'-O-methyluridine-3'-phosphate
  modified_base 19: mod_base = OTHER; note = 2'-O-methylcytidine-3'-phosphate
  modified_base 20: mod_base = OTHER; note = 2'-O-methylguanosine-3'-phosphate
  modified_base 21: mod_base = OTHER; note = 2'-O-methylguanosine-3'-phosphorothioate
  modified_base 22: mod_base = OTHER; note = 2'-O-methyladenosine-3'-phosphorothioate
  modified_base 23: mod_base = OTHER; note = 2'-O-methyluridine
aaattgtagagaacggctcggat

SEQ ID NO: 793 - RNA, 23 nt, synthetic construct
  source 1..23: mol_type = other RNA
  modified_base 1: mod_base = OTHER; note = 2'-O-methyladenosine-3'-phosphorothioate
  modified_base 2: mod_base = OTHER; note = 2'-deoxy-2'-fluorouridine-3'-phosphorothioate
  modified_base 3: mod_base = OTHER; note = 2'-O-methylcytidine-3'-phosphate
  modified_base 4: mod_base = OTHER; note = 2'-O-methyluridine-3'-phosphate
  modified_base 5: mod_base = OTHER; note = 2'-O-methylcytidine-3'-phosphate
  modified_base 6: mod_base = OTHER; note = 2'-deoxy-2'-fluorouridine-3'-phosphate
  modified_base 7: mod_base = OTHER; note = 2'-O-methylguanosine-3'-phosphate
  modified_base 8: mod_base = OTHER; note = 2'-deoxy-2'-fluorouridine-3'-phosphate
  modified_base 9: mod_base = OTHER; note = 2'-deoxy-2'-fluoroadenosine-3'-phosphate
  modified_base 10: mod_base = OTHER; note = 2'-O-methylguanosine-3'-phosphate
  modified_base 11: mod_base = OTHER; note = 2'-O-methylguanosine-3'-phosphate
  modified_base 12: mod_base = OTHER; note = 2'-O-methyluridine-3'-phosphate
  modified_base 13: mod_base = OTHER; note = 2'-O-methyluridine-3'-phosphate
  modified_base 14: mod_base = OTHER; note = 2'-deoxy-2'-fluorocytidine-3'-phosphate
  modified_base 15: mod_base = OTHER; note = 2'-O-methyladenosine-3'-phosphate
  modified_base 16: mod_base = OTHER; note = 2'-deoxy-2'-fluorouridine-3'-phosphate
  modified_base 17: mod_base = OTHER; note = 2'-O-methylguanosine-3'-phosphate
  modified_base 18: mod_base = OTHER; note = 2'-O-methyluridine-3'-phosphate
  modified_base 19: mod_base = OTHER; note = 2'-O-methyladenosine-3'-phosphate
  modified_base 20: mod_base = OTHER; note = 2'-O-methylguanosine-3'-phosphate
  modified_base 21: mod_base = OTHER; note = 2'-O-methyluridine-3'-phosphorothioate
  modified_base 22: mod_base = OTHER; note = 2'-O-methyluridine-3'-phosphorothioate
  modified_base 23: mod_base = OTHER; note = 2'-O-methylguanosine
atctctgtaggttcatgtagttg

SEQ ID NO: 794 - RNA, 23 nt, synthetic construct
  source 1..23: mol_type = other RNA
  modified_base 1: mod_base = OTHER; note = 2'-O-methyladenosine-3'-phosphorothioate
  modified_base 2: mod_base = OTHER; note = 2'-deoxy-2'-fluoroguanosine-3'-phosphorothioate
  modified_base 3: mod_base = OTHER; note = 2'-O-methyladenosine-3'-phosphate
  modified_base 4: mod_base = OTHER; note = 2'-O-methyladenosine-3'-phosphate
  modified_base 5: mod_base = OTHER; note = 2'-O-methyladenosine-3'-phosphate
  modified_base 6: mod_base = OTHER; note = 2'-deoxy-2'-fluorouridine-3'-phosphate
  modified_base 7: mod_base = OTHER; note = 2'-O-methyluridine-3'-phosphate
  modified_base 8: mod_base = OTHER; note = 2'-deoxy-2'-fluorouridine-3'-phosphate
  modified_base 9: mod_base = OTHER; note = 2'-deoxy-2'-fluoroguanosine-3'-phosphate
  modified_base 10: mod_base = OTHER; note = 2'-O-methyluridine-3'-phosphate
  modified_base 11: mod_base = OTHER; note = 2'-O-methyluridine-3'-phosphate
  modified_base 12: mod_base = OTHER; note = 2'-O-methyladenosine-3'-phosphate
  modified_base 13: mod_base = OTHER; note = 2'-O-methyladenosine-3'-phosphate
  modified_base 14: mod_base = OTHER; note = 2'-deoxy-2'-fluoroguanosine-3'-phosphate
  modified_base 15: mod_base = OTHER; note = 2'-O-methyladenosine-3'-phosphate
  modified_base 16: mod_base = OTHER; note = 2'-deoxy-2'-fluoroadenosine-3'-phosphate
  modified_base 17: mod_base = OTHER; note = 2'-O-methylguanosine-3'-phosphate
  modified_base 18: mod_base = OTHER; note = 2'-O-methyladenosine-3'-phosphate
  modified_base 19: mod_base = OTHER; note = 2'-O-methylguanosine-3'-phosphate
  modified_base 20: mod_base = OTHER; note = 2'-O-methylguanosine-3'-phosphate
  modified_base 21: mod_base = OTHER; note = 2'-O-methylcytidine-3'-phosphorothioate
  modified_base 22: mod_base = OTHER; note = 2'-O-methylcytidine-3'-phosphorothioate
  modified_base 23: mod_base = OTHER; note = 2'-O-methylcytidine
agaaatttgttaagaagaggccc

SEQ ID NO: 795 - RNA, 23 nt, synthetic construct
  source 1..23: mol_type = other RNA
  modified_base 1: mod_base = OTHER; note = 2'-O-methyladenosine-3'-phosphorothioate
  modified_base 2: mod_base = OTHER; note = 2'-deoxy-2'-fluoroguanosine-3'-phosphorothioate
  modified_base 3: mod_base = OTHER; note = 2'-O-methyluridine-3'-phosphate
  modified_base 4: mod_base = OTHER; note = 2'-O-methyluridine-3'-phosphate
  modified_base 5: mod_base = OTHER; note = 2'-O-methylcytidine-3'-phosphate
  modified_base 6: mod_base = OTHER; note = 2'-deoxy-2'-fluorouridine-3'-phosphate
  modified_base 7: mod_base = OTHER; note = 2'-O-methyluridine-3'-phosphate
  modified_base 8: mod_base = OTHER; note = 2'-deoxy-2'-fluoroadenosine-3'-phosphate
  modified_base 9: mod_base = OTHER; note = 2'-deoxy-2'-fluorouridine-3'-phosphate
  modified_base 10: mod_base = OTHER; note = 2'-O-methylcytidine-3'-phosphate
  modified_base 11: mod_base = OTHER; note = 2'-O-methyluridine-3'-phosphate
  modified_base 12: mod_base = OTHER; note = 2'-O-methyluridine-3'-phosphate
  modified_base 13: mod_base = OTHER; note = 2'-O-methyluridine-3'-phosphate
  modified_base 14: mod_base = OTHER; note = 2'-deoxy-2'-fluoroguanosine-3'-phosphate
  modified_base 15: mod_base = OTHER; note = 2'-O-methylguanosine-3'-phosphate
  modified_base 16: mod_base = OTHER; note = 2'-deoxy-2'-fluorocytidine-3'-phosphate
  modified_base 17: mod_base = OTHER; note = 2'-O-methyluridine-3'-phosphate
  modified_base 18: mod_base = OTHER; note = 2'-O-methylguanosine-3'-phosphate
  modified_base 19: mod_base = OTHER; note = 2'-O-methyluridine-3'-phosphate
  modified_base 20: mod_base = OTHER; note = 2'-O-methylguanosine-3'-phosphate
  modified_base 21: mod_base = OTHER; note = 2'-O-methylguanosine-3'-phosphorothioate
  modified_base 22: mod_base = OTHER; note = 2'-O-methyluridine-3'-phosphorothioate
  modified_base 23: mod_base = OTHER; note = 2'-O-methylcytidine
agttcttatctttggctgtggtc

SEQ ID NO: 796 - RNA, 23 nt, synthetic construct
  source 1..23: mol_type = other RNA
  modified_base 1: mod_base = OTHER; note = 2'-O-methyladenosine-3'-phosphorothioate
  modified_base 2: mod_base = OTHER; note = 2'-deoxy-2'-fluoroadenosine-3'-phosphorothioate
  modified_base 3: mod_base = OTHER; note = 2'-O-methyladenosine-3'-phosphate
  modified_base 4: mod_base = OTHER; note = 2'-O-methylguanosine-3'-phosphate
  modified_base 5: mod_base = OTHER; note = 2'-O-methyluridine-3'-phosphate
  modified_base 6: mod_base = OTHER; note = 2'-deoxy-2'-fluorocytidine-3'-phosphate
  modified_base 7: mod_base = OTHER; note = 2'-O-methyluridine-3'-phosphate
  modified_base 8: mod_base = OTHER; note = 2'-deoxy-2'-fluorouridine-3'-phosphate
  modified_base 9: mod_base = OTHER; note = 2'-deoxy-2'-fluorouridine-3'-phosphate
  modified_base 10: mod_base = OTHER; note = 2'-O-methyluridine-3'-phosphate
  modified_base 11: mod_base = OTHER; note = 2'-O-methyladenosine-3'-phosphate
  modified_base 12: mod_base = OTHER; note = 2'-O-methylguanosine-3'-phosphate
  modified_base 13: mod_base = OTHER; note = 2'-O-methylcytidine-3'-phosphate
  modified_base 14: mod_base = OTHER; note = 2'-deoxy-2'-fluorouridine-3'-phosphate
  modified_base 15: mod_base = OTHER; note = 2'-O-methylguanosine-3'-phosphate
  modified_base 16: mod_base = OTHER; note = 2'-deoxy-2'-fluorocytidine-3'-phosphate
  modified_base 17: mod_base = OTHER; note = 2'-O-methyladenosine-3'-phosphate
  modified_base 18: mod_base = OTHER; note = 2'-O-methylguanosine-3'-phosphate
  modified_base 19: mod_base = OTHER; note = 2'-O-methyluridine-3'-phosphate
  modified_base 20: mod_base = OTHER; note = 2'-O-methyladenosine-3'-phosphate
  modified_base 21: mod_base = OTHER; note = 2'-O-methylguanosine-3'-phosphorothioate
  modified_base 22: mod_base = OTHER; note = 2'-O-methylguanosine-3'-phosphorothioate
  modified_base 23: mod_base = OTHER; note = 2'-O-methylguanosine
aaagtcttttagctgcagtaggg

SEQ ID NO: 797 - RNA, 23 nt, synthetic construct
  source 1..23: mol_type = other RNA
  modified_base 1: mod_base = OTHER; note = 2'-O-methyladenosine-3'-phosphorothioate
  modified_base 2: mod_base = OTHER; note = 2'-deoxy-2'-fluorouridine-3'-phosphorothioate
  modified_base 3: mod_base = OTHER; note = 2'-O-methyluridine-3'-phosphate
  modified_base 4: mod_base = OTHER; note = 2'-O-methylguanosine-3'-phosphate
  modified_base 5: mod_base = OTHER; note = 2'-O-methyladenosine-3'-phosphate
  modified_base 6: mod_base = OTHER; note = 2'-deoxy-2'-fluoroguanosine-3'-phosphate
  modified_base 7: mod_base = OTHER; note = 2'-O-methylcytidine-3'-phosphate
  modified_base 8: mod_base = OTHER; note = 2'-deoxy-2'-fluorocytidine-3'-phosphate
  modified_base 9: mod_base = OTHER; note = 2'-deoxy-2'-fluoroadenosine-3'-phosphate
  modified_base 10: mod_base = OTHER; note = 2'-O-methyladenosine-3'-phosphate
  modified_base 11: mod_base = OTHER; note = 2'-O-methylcytidine-3'-phosphate
  modified_base 12: mod_base = OTHER; note = 2'-O-methylguanosine-3'-phosphate
  modified_base 13: mod_base = OTHER; note = 2'-O-methylcytidine-3'-phosphate
  modified_base 14: mod_base = OTHER; note = 2'-deoxy-2'-fluoroadenosine-3'-phosphate
  modified_base 15: mod_base = OTHER; note = 2'-O-methylcytidine-3'-phosphate
  modified_base 16: mod_base = OTHER; note = 2'-deoxy-2'-fluoroguanosine-3'-phosphate
  modified_base 17: mod_base = OTHER; note = 2'-O-methyladenosine-3'-phosphate
  modified_base 18: mod_base = OTHER; note = 2'-O-methylcytidine-3'-phosphate
  modified_base 19: mod_base = OTHER; note = 2'-O-methylguanosine-3'-phosphate
  modified_base 20: mod_base = OTHER; note = 2'-O-methylguanosine-3'-phosphate
  modified_base 21: mod_base = OTHER; note = 2'-O-methylguanosine-3'-phosphorothioate
  modified_base 22: mod_base = OTHER; note = 2'-O-methyladenosine-3'-phosphorothioate
  modified_base 23: mod_base = OTHER; note = 2'-O-methylguanosine
attgagccaacgcacgacgggag

SEQ ID NO: 798 - RNA, 23 nt, synthetic construct
  source 1..23: mol_type = other RNA
  modified_base 1: mod_base = OTHER; note = 2'-O-methyladenosine-3'-phosphorothioate
  modified_base 2: mod_base = OTHER; note = 2'-deoxy-2'-fluoroguanosine-3'-phosphorothioate
  modified_base 3: mod_base = OTHER; note = 2'-O-methyluridine-3'-phosphate
  modified_base 4: mod_base = OTHER; note = 2'-O-methyluridine-3'-phosphate
  modified_base 5: mod_base = OTHER; note = 2'-O-methylcytidine-3'-phosphate
  modified_base 6: mod_base = OTHER; note = 2'-deoxy-2'-fluoroadenosine-3'-phosphate
  modified_base 7: mod_base = OTHER; note = 2'-O-methyluridine-3'-phosphate
  modified_base 8: mod_base = OTHER; note = 2'-deoxy-2'-fluorouridine-3'-phosphate
  modified_base 9: mod_base = OTHER; note = 2'-deoxy-2'-fluoroguanosine-3'-phosphate
  modified_base 10: mod_base = OTHER; note = 2'-O-methyladenosine-3'-phosphate
  modified_base 11: mod_base = OTHER; note = 2'-O-methylguanosine-3'-phosphate
  modified_base 12: mod_base = OTHER; note = 2'-O-methylcytidine-3'-phosphate
  modified_base 13: mod_base = OTHER; note = 2'-O-methylcytidine-3'-phosphate
  modified_base 14: mod_base = OTHER; note = 2'-deoxy-2'-fluoroadenosine-3'-phosphate
  modified_base 15: mod_base = OTHER; note = 2'-O-methyladenosine-3'-phosphate
  modified_base 16: mod_base = OTHER; note = 2'-deoxy-2'-fluorocytidine-3'-phosphate
  modified_base 17: mod_base = OTHER; note = 2'-O-methylguanosine-3'-phosphate
  modified_base 18: mod_base = OTHER; note = 2'-O-methylcytidine-3'-phosphate
  modified_base 19: mod_base = OTHER; note = 2'-O-methyladenosine-3'-phosphate
  modified_base 20: mod_base = OTHER; note = 2'-O-methylcytidine-3'-phosphate
  modified_base 21: mod_base = OTHER; note = 2'-O-methylguanosine-3'-phosphorothioate
  modified_base 22: mod_base = OTHER; note = 2'-O-methyladenosine-3'-phosphorothioate
  modified_base 23: mod_base = OTHER; note = 2'-O-methylcytidine
agttcattgagccaacgcacgac

SEQ ID NO: 799 - RNA, 23 nt, synthetic construct
  source 1..23: mol_type = other RNA
  modified_base 1: mod_base = OTHER; note = 2'-O-methyladenosine-3'-phosphorothioate
  modified_base 2: mod_base = OTHER; note = 2'-deoxy-2'-fluoroguanosine-3'-phosphorothioate
  modified_base 3: mod_base = OTHER; note = 2'-O-methyladenosine-3'-phosphate
  modified_base 4: mod_base = OTHER; note = 2'-O-methyluridine-3'-phosphate
  modified_base 5: mod_base = OTHER; note = 2'-O-methyluridine-3'-phosphate
  modified_base 6: mod_base = OTHER; note = 2'-deoxy-2'-fluorocytidine-3'-phosphate
  modified_base 7: mod_base = OTHER; note = 2'-O-methylcytidine-3'-phosphate
  modified_base 8: mod_base = OTHER; note = 2'-deoxy-2'-fluorocytidine-3'-phosphate
  modified_base 9: mod_base = OTHER; note = 2'-deoxy-2'-fluoroadenosine-3'-phosphate
  modified_base 10: mod_base = OTHER; note = 2'-O-methylguanosine-3'-phosphate
  modified_base 11: mod_base = OTHER; note = 2'-O-methyluridine-3'-phosphate
  modified_base 12: mod_base = OTHER; note = 2'-O-methylguanosine-3'-phosphate
  modified_base 13: mod_base = OTHER; note = 2'-O-methylguanosine-3'-phosphate
  modified_base 14: mod_base = OTHER; note = 2'-deoxy-2'-fluoroadenosine-3'-phosphate
  modified_base 15: mod_base = OTHER; note = 2'-O-methyluridine-3'-phosphate
  modified_base 16: mod_base = OTHER; note = 2'-deoxy-2'-fluoroadenosine-3'-phosphate
  modified_base 17: mod_base = OTHER; note = 2'-O-methylcytidine-3'-phosphate
  modified_base 18: mod_base = OTHER; note = 2'-O-methylguanosine-3'-phosphate
  modified_base 19: mod_base = OTHER; note = 2'-O-methylguanosine-3'-phosphate
  modified_base 20: mod_base = OTHER; note = 2'-O-methyluridine-3'-phosphate
  modified_base 21: mod_base = OTHER; note = 2'-O-methylguanosine-3'-phosphorothioate
  modified_base 22: mod_base = OTHER; note = 2'-O-methylguanosine-3'-phosphorothioate
  modified_base 23: mod_base = OTHER; note = 2'-O-methylguanosine
agattcccagtggatacggtggg

SEQ ID NO: 800 - RNA, 23 nt, synthetic construct
  source 1..23: mol_type = other RNA
  modified_base 1: mod_base = OTHER; note = 2'-O-methyladenosine-3'-phosphorothioate
  modified_base 2: mod_base = OTHER; note = 2'-deoxy-2'-fluorocytidine-3'-phosphorothioate
  modified_base 3: mod_base = OTHER; note = 2'-O-methyluridine-3'-phosphate
  modified_base 4: mod_base = OTHER; note = 2'-O-methyluridine-3'-phosphate
  modified_base 5: mod_base = OTHER; note = 2'-O-methylguanosine-3'-phosphate
  modified_base 6: mod_base = OTHER; note = 2'-deoxy-2'-fluoroguanosine-3'-phosphate
  modified_base 7: mod_base = OTHER; note = 2'-O-methyluridine-3'-phosphate
  modified_base 8: mod_base = OTHER; note = 2'-deoxy-2'-fluorocytidine-3'-phosphate
  modified_base 9: mod_base = OTHER; note = 2'-deoxy-2'-fluorouridine-3'-phosphate
  modified_base 10: mod_base = OTHER; note = 2'-O-methylcytidine-3'-phosphate
  modified_base 11: mod_base = OTHER; note = 2'-O-methyluridine-3'-phosphate
  modified_base 12: mod_base = OTHER; note = 2'-O-methyluridine-3'-phosphate
  modified_base 13: mod_base = OTHER; note = 2'-O-methylcytidine-3'-phosphate
  modified_base 14: mod_base = OTHER; note = 2'-deoxy-2'-fluorouridine-3'-phosphate
  modified_base 15: mod_base = OTHER; note = 2'-O-methylguanosine-3'-phosphate
  modified_base 16: mod_base = OTHER; note = 2'-deoxy-2'-fluoroadenosine-3'-phosphate
  modified_base 17: mod_base = OTHER; note = 2'-O-methyluridine-3'-phosphate
  modified_base 18: mod_base = OTHER; note = 2'-O-methylcytidine-3'-phosphate
  modified_base 19: mod_base = OTHER; note = 2'-O-methylguanosine-3'-phosphate
  modified_base 20: mod_base = OTHER; note = 2'-O-methylcytidine-3'-phosphate
  modified_base 21: mod_base = OTHER; note = 2'-O-methyladenosine-3'-phosphorothioate
  modified_base 22: mod_base = OTHER; note = 2'-O-methylguanosine-3'-phosphorothioate
  modified_base 23: mod_base = OTHER; note = 2'-O-methylguanosine
acttggtctcttctgatcgcagg

SEQ ID NO: 801 - RNA, 23 nt, synthetic construct
  source 1..23: mol_type = other RNA
  modified_base 1: mod_base = OTHER; note = 2'-O-methyladenosine-3'-phosphorothioate
  modified_base 2: mod_base = OTHER; note = 2'-deoxy-2'-fluoroguanosine-3'-phosphorothioate
  modified_base 3: mod_base = OTHER; note = 2'-O-methyluridine-3'-phosphate
  modified_base 4: mod_base = OTHER; note = 2'-O-methyluridine-3'-phosphate
  modified_base 5: mod_base = OTHER; note = 2'-O-methylguanosine-3'-phosphate
  modified_base 6: mod_base = OTHER; note = 2'-deoxy-2'-fluoroadenosine-3'-phosphate
  modified_base 7: mod_base = OTHER; note = 2'-O-methyluridine-3'-phosphate
  modified_base 8: mod_base = OTHER; note = 2'-deoxy-2'-fluorocytidine-3'-phosphate
  modified_base 9: mod_base = OTHER; note = 2'-deoxy-2'-fluorouridine-3'-phosphate
  modified_base 10: mod_base = OTHER; note = 2'-O-methyluridine-3'-phosphate
  modified_base 11: mod_base = OTHER; note = 2'-O-methyluridine-3'-phosphate
  modified_base 12: mod_base = OTHER; note = 2'-O-methylguanosine-3'-phosphate
  modified_base 13: mod_base = OTHER; note = 2'-O-methylguanosine-3'-phosphate
  modified_base 14: mod_base = OTHER; note = 2'-deoxy-2'-fluorocytidine-3'-phosphate
  modified_base 15: mod_base = OTHER; note = 2'-O-methylcytidine-3'-phosphate
  modified_base 16: mod_base = OTHER; note = 2'-deoxy-2'-fluorouridine-3'-phosphate
  modified_base 17: mod_base = OTHER; note = 2'-O-methyluridine-3'-phosphate
  modified_base 18: mod_base = OTHER; note = 2'-O-methyladenosine-3'-phosphate
  modified_base 19: mod_base = OTHER; note = 2'-O-methylguanosine-3'-phosphate
  modified_base 20: mod_base = OTHER; note = 2'-O-methylcytidine-3'-phosphate
  modified_base 21: mod_base = OTHER; note = 2'-O-methyladenosine-3'-phosphorothioate
  modified_base 22: mod_base = OTHER; note = 2'-O-methyluridine-3'-phosphorothioate
  modified_base 23: mod_base = OTHER; note = 2'-O-methylguanosine
agttgatctttggccttagcatg

SEQ ID NO: 802 - RNA, 23 nt, synthetic construct
  source 1..23: mol_type = other RNA
  modified_base 1: mod_base = OTHER; note = 2'-O-methyladenosine-3'-phosphorothioate
  modified_base 2: mod_base = OTHER; note = 2'-deoxy-2'-fluorouridine-3'-phosphorothioate
  modified_base 3: mod_base = OTHER; note = 2'-O-methylguanosine-3'-phosphate
  modified_base 4: mod_base = OTHER; note = 2'-O-methyluridine-3'-phosphate
  modified_base 5: mod_base = OTHER; note = 2'-O-methyladenosine-3'-phosphate
  modified_base 6: mod_base = OTHER; note = 2'-deoxy-2'-fluoroadenosine-3'-phosphate
  modified_base 7: mod_base = OTHER; note = 2'-O-methyluridine-3'-phosphate
  modified_base 8: mod_base = OTHER; note = 2'-deoxy-2'-fluoroadenosine-3'-phosphate
  modified_base 9: mod_base = OTHER; note = 2'-deoxy-2'-fluoroguanosine-3'-phosphate
  modified_base 10: mod_base = OTHER; note = 2'-O-methylguanosine-3'-phosphate
  modified_base 11: mod_base = OTHER; note = 2'-O-methylcytidine-3'-phosphate
  modified_base 12: mod_base = OTHER; note = 2'-O-methylguanosine-3'-phosphate
  modified_base 13: mod_base = OTHER; note = 2'-O-methyluridine-3'-phosphate
  modified_base 14: mod_base = OTHER; note = 2'-deoxy-2'-fluoroadenosine-3'-phosphate
  modified_base 15: mod_base = OTHER; note = 2'-O-methylguanosine-3'-phosphate
  modified_base 16: mod_base = OTHER; note = 2'-deoxy-2'-fluoroadenosine-3'-phosphate
  modified_base 17: mod_base = OTHER; note = 2'-O-methylcytidine-3'-phosphate
  modified_base 18: mod_base = OTHER; note = 2'-O-methylcytidine-3'-phosphate
  modified_base 19: mod_base = OTHER; note = 2'-O-methyluridine-3'-phosphate
  modified_base 20: mod_base = OTHER; note = 2'-O-methyluridine-3'-phosphate
  modified_base 21: mod_base = OTHER; note = 2'-O-methylguanosine-3'-phosphorothioate
  modified_base 22: mod_base = OTHER; note = 2'-O-methyladenosine-3'-phosphorothioate
  modified_base 23: mod_base = OTHER; note = 2'-O-methylcytidine
atgtaataggcgtagaccttgac

SEQ ID NO: 803 - RNA, 23 nt, synthetic construct
  source 1..23: mol_type = other RNA
  modified_base 1: mod_base = OTHER; note = 2'-O-methyladenosine-3'-phosphorothioate
  modified_base 2: mod_base = OTHER; note = 2'-deoxy-2'-fluorouridine-3'-phosphorothioate
  modified_base 3: mod_base = OTHER; note = 2'-O-methylguanosine-3'-phosphate
  modified_base 4: mod_base = OTHER; note = 2'-O-methyluridine-3'-phosphate
  modified_base 5: mod_base = OTHER; note = 2'-O-methyladenosine-3'-phosphate
  modified_base 6: mod_base = OTHER; note = 2'-deoxy-2'-fluoroadenosine-3'-phosphate
  modified_base 7: mod_base = OTHER; note = 2'-O-methyluridine-3'-phosphate
  modified_base 8: mod_base = OTHER; note = 2'-deoxy-2'-fluoroadenosine-3'-phosphate
  modified_base 9: mod_base = OTHER; note = 2'-deoxy-2'-fluoroguanosine-3'-phosphate
  modified_base 10: mod_base = OTHER; note = 2'-O-methylguanosine-3'-phosphate
  modified_base 11: mod_base = OTHER; note = 2'-O-methylcytidine-3'-phosphate
  modified_base 12: mod_base = OTHER; note = 2'-O-methylguanosine-3'-phosphate
  modified_base 13: mod_base = OTHER; note = 2'-O-methyluridine-3'-phosphate
  modified_base 14: mod_base = OTHER; note = 2'-deoxy-2'-fluoroadenosine-3'-phosphate
  modified_base 15: mod_base = OTHER; note = 2'-O-methylguanosine-3'-phosphate
  modified_base 16: mod_base = OTHER; note = 2'-deoxy-2'-fluoroadenosine-3'-phosphate
  modified_base 17: mod_base = OTHER; note = 2'-O-methylcytidine-3'-phosphate
  modified_base 18: mod_base = OTHER; note = 2'-O-methylcytidine-3'-phosphate
  modified_base 19: mod_base = OTHER; note = 2'-O-methyluridine-3'-phosphate
  modified_base 20: mod_base = OTHER; note = 2'-O-methyluridine-3'-phosphate
  modified_base 21: mod_base = OTHER; note = 2'-O-methylguanosine-3'-phosphorothioate
  modified_base 22: mod_base = OTHER; note = 2'-O-methyladenosine-3'-phosphorothioate
  modified_base 23: mod_base = OTHER; note = 2'-O-methylcytidine
atgtaataggcgtagaccttgac

SEQ ID NO: 804 - RNA, 23 nt, synthetic construct
  source 1..23: mol_type = other RNA
  modified_base 1: mod_base = OTHER; note = 2'-O-methyladenosine-3'-phosphorothioate
  modified_base 2: mod_base = OTHER; note = 2'-deoxy-2'-fluorouridine-3'-phosphorothioate
  modified_base 3: mod_base = OTHER; note = 2'-O-methylguanosine-3'-phosphate
  modified_base 4: mod_base = OTHER; note = 2'-O-methyluridine-3'-phosphate
  modified_base 5: mod_base = OTHER; note = 2'-O-methyladenosine-3'-phosphate
  modified_base 6: mod_base = OTHER; note = 2'-deoxy-2'-fluoroadenosine-3'-phosphate
  modified_base 7: mod_base = OTHER; note = 2'-O-methyluridine-3'-phosphate
  modified_base 8: mod_base = OTHER; note = 2'-deoxy-2'-fluoroadenosine-3'-phosphate
  modified_base 9: mod_base = OTHER; note = 2'-deoxy-2'-fluoroguanosine-3'-phosphate
  modified_base 10: mod_base = OTHER; note = 2'-O-methylguanosine-3'-phosphate
  modified_base 11: mod_base = OTHER; note = 2'-O-methylcytidine-3'-phosphate
  modified_base 12: mod_base = OTHER; note = 2'-O-methylguanosine-3'-phosphate
  modified_base 13: mod_base = OTHER; note = 2'-O-methyluridine-3'-phosphate
  modified_base 14: mod_base = OTHER; note = 2'-deoxy-2'-fluoroadenosine-3'-phosphate
  modified_base 15: mod_base = OTHER; note = 2'-O-methylguanosine-3'-phosphate
  modified_base 16: mod_base = OTHER; note = 2'-deoxy-2'-fluoroadenosine-3'-phosphate
  modified_base 17: mod_base = OTHER; note = 2'-O-methylcytidine-3'-phosphate
  modified_base 18: mod_base = OTHER; note = 2'-O-methylcytidine-3'-phosphate
  modified_base 19: mod_base = OTHER; note = 2'-O-methyluridine-3'-phosphate
  modified_base 20: mod_base = OTHER; note = 2'-O-methyluridine-3'-phosphate
  modified_base 21: mod_base = OTHER; note = 2'-O-methylguanosine-3'-phosphorothioate
  modified_base 22: mod_base = OTHER; note = 2'-O-methyladenosine-3'-phosphorothioate
  modified_base 23: mod_base = OTHER; note = 2'-O-methylcytidine
atgtaataggcgtagaccttgac

SEQ ID NO: 805 - RNA, 23 nt, synthetic construct
  source 1..23: mol_type = other RNA
  modified_base 1: mod_base = OTHER; note = 2'-O-methyladenosine-3'-phosphorothioate
  modified_base 2: mod_base = OTHER; note = 2'-deoxy-2'-fluoroadenosine-3'-phosphorothioate
  modified_base 3: mod_base = OTHER; note = 2'-O-methyluridine-3'-phosphate
  modified_base 4: mod_base = OTHER; note = 2'-O-methylguanosine-3'-phosphate
  modified_base 5: mod_base = OTHER; note = 2'-O-methyladenosine-3'-phosphate
  modified_base 6: mod_base = OTHER; note = 2'-deoxy-2'-fluoroadenosine-3'-phosphate
  modified_base 7: mod_base = OTHER; note = 2'-O-methylguanosine-3'-phosphate
  modified_base 8: mod_base = OTHER; note = 2'-deoxy-2'-fluorocytidine-3'-phosphate
  modified_base 9: mod_base = OTHER; note = 2'-deoxy-2'-fluoroadenosine-3'-phosphate
  modified_base 10: mod_base = OTHER; note = 2'-O-methyladenosine-3'-phosphate
  modified_base 11: mod_base = OTHER; note = 2'-O-methyluridine-3'-phosphate
  modified_base 12: mod_base = OTHER; note = 2'-O-methyluridine-3'-phosphate
  modified_base 13: mod_base = OTHER; note = 2'-O-methylcytidine-3'-phosphate
  modified_base 14: mod_base = OTHER; note = 2'-deoxy-2'-fluorouridine-3'-phosphate
  modified_base 15: mod_base = OTHER; note = 2'-O-methylcytidine-3'-phosphate
  modified_base 16: mod_base = OTHER; note = 2'-deoxy-2'-fluorocytidine-3'-phosphate
  modified_base 17: mod_base = OTHER; note = 2'-O-methyluridine-3'-phosphate
  modified_base 18: mod_base = OTHER; note = 2'-O-methylcytidine-3'-phosphate
  modified_base 19: mod_base = OTHER; note = 2'-O-methyladenosine-3'-phosphate
  modified_base 20: mod_base = OTHER; note = 2'-O-methylguanosine-3'-phosphate
  modified_base 21: mod_base = OTHER; note = 2'-O-methylcytidine-3'-phosphorothioate
  modified_base 22: mod_base = OTHER; note = 2'-O-methyladenosine-3'-phosphorothioate
  modified_base 23: mod_base = OTHER; note = 2'-O-methylcytidine
aatgaagcaattctcctcagcac

SEQ ID NO: 806 - RNA, 23 nt, synthetic construct
  source 1..23: mol_type = other RNA
  modified_base 1: mod_base = OTHER; note = 2'-O-methyladenosine-3'-phosphorothioate
  modified_base 2: mod_base = OTHER; note = 2'-deoxy-2'-fluoroadenosine-3'-phosphorothioate
  modified_base 3: mod_base = OTHER; note = 2'-O-methyluridine-3'-phosphate
  modified_base 4: mod_base = OTHER; note = 2'-O-methylguanosine-3'-phosphate
  modified_base 5: mod_base = OTHER; note = 2'-O-methyladenosine-3'-phosphate
  modified_base 6: mod_base = OTHER; note = 2'-deoxy-2'-fluoroadenosine-3'-phosphate
  modified_base 7: mod_base = OTHER; note = 2'-O-methylguanosine-3'-phosphate
  modified_base 8: mod_base = OTHER; note = 2'-deoxy-2'-fluorocytidine-3'-phosphate
  modified_base 9: mod_base = OTHER; note = 2'-deoxy-2'-fluoroadenosine-3'-phosphate
  modified_base 10: mod_base = OTHER; note = 2'-O-methyladenosine-3'-phosphate
  modified_base 11: mod_base = OTHER; note = 2'-O-methyluridine-3'-phosphate
  modified_base 12: mod_base = OTHER; note = 2'-O-methyluridine-3'-phosphate
  modified_base 13: mod_base = OTHER; note = 2'-O-methylcytidine-3'-phosphate
  modified_base 14: mod_base = OTHER; note = 2'-deoxy-2'-fluorouridine-3'-phosphate
  modified_base 15: mod_base = OTHER; note = 2'-O-methylcytidine-3'-phosphate
  modified_base 16: mod_base = OTHER; note = 2'-deoxy-2'-fluorocytidine-3'-phosphate
  modified_base 17: mod_base = OTHER; note = 2'-O-methyluridine-3'-phosphate
  modified_base 18: mod_base = OTHER; note = 2'-O-methylcytidine-3'-phosphate
  modified_base 19: mod_base = OTHER; note = 2'-O-methyladenosine-3'-phosphate
  modified_base 20: mod_base = OTHER; note = 2'-O-methylguanosine-3'-phosphate
  modified_base 21: mod_base = OTHER; note = 2'-O-methylcytidine-3'-phosphorothioate
  modified_base 22: mod_base = OTHER; note = 2'-O-methyladenosine-3'-phosphorothioate
  modified_base 23: mod_base = OTHER; note = 2'-O-methylcytidine
aatgaagcaattctcctcagcac

SEQ ID NO: 807 - RNA, 23 nt, synthetic construct
  source 1..23: mol_type = other RNA
  modified_base 1: mod_base = OTHER; note = 2'-O-methyladenosine-3'-phosphorothioate
  modified_base 2: mod_base = OTHER; note = 2'-deoxy-2'-fluoroadenosine-3'-phosphorothioate
  modified_base 3: mod_base = OTHER; note = 2'-O-methyluridine-3'-phosphate
  modified_base 4: mod_base = OTHER; note = 2'-O-methylguanosine-3'-phosphate
  modified_base 5: mod_base = OTHER; note = 2'-O-methyladenosine-3'-phosphate
  modified_base 6: mod_base = OTHER; note = 2'-deoxy-2'-fluoroadenosine-3'-phosphate
  modified_base 7: mod_base = OTHER; note = 2'-O-methylguanosine-3'-phosphate
  modified_base 8: mod_base = OTHER; note = 2'-deoxy-2'-fluorocytidine-3'-phosphate
  modified_base 9: mod_base = OTHER; note = 2'-deoxy-2'-fluoroadenosine-3'-phosphate
  modified_base 10: mod_base = OTHER; note = 2'-O-methyladenosine-3'-phosphate
  modified_base 11: mod_base = OTHER; note = 2'-O-methyluridine-3'-phosphate
  modified_base 12: mod_base = OTHER; note = 2'-O-methyluridine-3'-phosphate
  modified_base 13: mod_base = OTHER; note = 2'-O-methylcytidine-3'-phosphate
  modified_base 14: mod_base = OTHER; note = 2'-deoxy-2'-fluorouridine-3'-phosphate
  modified_base 15: mod_base = OTHER; note = 2'-O-methylcytidine-3'-phosphate
  modified_base 16: mod_base = OTHER; note = 2'-deoxy-2'-fluorocytidine-3'-phosphate
  modified_base 17: mod_base = OTHER; note = 2'-O-methyluridine-3'-phosphate
  modified_base 18: mod_base = OTHER; note = 2'-O-methylcytidine-3'-phosphate
  modified_base 19: mod_base = OTHER; note = 2'-O-methyladenosine-3'-phosphate
  modified_base 20: mod_base = OTHER; note = 2'-O-methylguanosine-3'-phosphate
  modified_base 21: mod_base = OTHER; note = 2'-O-methylcytidine-3'-phosphorothioate
  modified_base 22: mod_base = OTHER; note = 2'-O-methyladenosine-3'-phosphorothioate
  modified_base 23: mod_base = OTHER; note = 2'-O-methylcytidine
aatgaagcaattctcctcagcac

SEQ ID NO: 808 - RNA, 23 nt, synthetic construct
  source 1..23: mol_type = other RNA
  modified_base 1: mod_base = OTHER; note = 2'-O-methyladenosine-3'-phosphorothioate
  modified_base 2: mod_base = OTHER; note = 2'-deoxy-2'-fluorouridine-3'-phosphorothioate
  modified_base 3: mod_base = OTHER; note = 2'-O-methylcytidine-3'-phosphate
  modified_base 4: mod_base = OTHER; note = 2'-O-methyluridine-3'-phosphate
  modified_base 5: mod_base = OTHER; note = 2'-O-methyluridine-3'-phosphate
  modified_base 6: mod_base = OTHER; note = 2'-deoxy-2'-fluoroguanosine-3'-phosphate
  modified_base 7: mod_base = OTHER; note = 2'-O-methyluridine-3'-phosphate
  modified_base 8: mod_base = OTHER; note = 2'-deoxy-2'-fluoroadenosine-3'-phosphate
  modified_base 9: mod_base = OTHER; note = 2'-deoxy-2'-fluorocytidine-3'-phosphate
  modified_base 10: mod_base = OTHER; note = 2'-O-methyladenosine-3'-phosphate
  modified_base 11: mod_base = OTHER; note = 2'-O-methylcytidine-3'-phosphate
  modified_base 12: mod_base = OTHER; note = 2'-O-methyladenosine-3'-phosphate
  modified_base 13: mod_base = OTHER; note = 2'-O-methyluridine-3'-phosphate
  modified_base 14: mod_base = OTHER; note = 2'-deoxy-2'-fluoroadenosine-3'-phosphate
  modified_base 15: mod_base = OTHER; note = 2'-O-methylguanosine-3'-phosphate
  modified_base 16: mod_base = OTHER; note = 2'-deoxy-2'-fluorouridine-3'-phosphate
  modified_base 17: mod_base = OTHER; note = 2'-O-methylcytidine-3'-phosphate
  modified_base 18: mod_base = OTHER; note = 2'-O-methylcytidine-3'-phosphate
  modified_base 19: mod_base = OTHER; note = 2'-O-methyladenosine-3'-phosphate
  modified_base 20: mod_base = OTHER; note = 2'-O-methylcytidine-3'-phosphate
  modified_base 21: mod_base = OTHER; note = 2'-O-methyluridine-3'-phosphorothioate
  modified_base 22: mod_base = OTHER; note = 2'-O-methylcytidine-3'-phosphorothioate
  modified_base 23: mod_base = OTHER; note = 2'-O-methylcytidine
atcttgtacacatagtccactcc

SEQ ID NO: 809 - RNA, 23 nt, synthetic construct
  source 1..23: mol_type = other RNA
  modified_base 1: mod_base = OTHER; note = 2'-O-methyladenosine-3'-phosphorothioate
  modified_base 2: mod_base = OTHER; note = 2'-deoxy-2'-fluoroguanosine-3'-phosphorothioate
  modified_base 3: mod_base = OTHER; note = 2'-O-methylguanosine-3'-phosphate
  modified_base 4: mod_base = OTHER; note = 2'-O-methyluridine-3'-phosphate
  modified_base 5: mod_base = OTHER; note = 2'-O-methylcytidine-3'-phosphate
  modified_base 6: mod_base = OTHER; note = 2'-deoxy-2'-fluorouridine-3'-phosphate
  modified_base 7: mod_base = OTHER; note = 2'-O-methyluridine-3'-phosphate
  modified_base 8: mod_base = OTHER; note = 2'-deoxy-2'-fluoroguanosine-3'-phosphate
  modified_base 9: mod_base = OTHER; note = 2'-deoxy-2'-fluorouridine-3'-phosphate
  modified_base 10: mod_base = OTHER; note = 2'-O-methyladenosine-3'-phosphate
  modified_base 11: mod_base = OTHER; note = 2'-O-methylcytidine-3'-phosphate
  modified_base 12: mod_base = OTHER; note = 2'-O-methyladenosine-3'-phosphate
  modified_base 13: mod_base = OTHER; note = 2'-O-methylcytidine-3'-phosphate
  modified_base 14: mod_base = OTHER; note = 2'-deoxy-2'-fluoroadenosine-3'-phosphate
  modified_base 15: mod_base = OTHER; note = 2'-O-methyluridine-3'-phosphate
  modified_base 16: mod_base = OTHER; note = 2'-deoxy-2'-fluoroadenosine-3'-phosphate
  modified_base 17: mod_base = OTHER; note = 2'-O-methylguanosine-3'-phosphate
  modified_base 18: mod_base = OTHER; note = 2'-O-methyluridine-3'-phosphate
  modified_base 19: mod_base = OTHER; note = 2'-O-methylcytidine-3'-phosphate
  modified_base 20: mod_base = OTHER; note = 2'-O-methylcytidine-3'-phosphate
  modified_base 21: mod_base = OTHER; note = 2'-O-methyladenosine-3'-phosphorothioate
  modified_base 22: mod_base = OTHER; note = 2'-O-methylcytidine-3'-phosphorothioate
  modified_base 23: mod_base = OTHER; note = 2'-O-methyluridine
aggtcttgtacacatagtccact

SEQ ID NO: 810 - RNA, 23 nt, synthetic construct
  source 1..23: mol_type = other RNA
  modified_base 1: mod_base = OTHER; note = 2'-O-methyladenosine-3'-phosphorothioate
  modified_base 2: mod_base = OTHER; note = 2'-deoxy-2'-fluorouridine-3'-phosphorothioate
  modified_base 3: mod_base = OTHER; note = 2'-O-methylguanosine-3'-phosphate
  modified_base 4: mod_base = OTHER; note = 2'-O-methylguanosine-3'-phosphate
  modified_base 5: mod_base = OTHER; note = 2'-O-methylcytidine-3'-phosphate
  modified_base 6: mod_base = OTHER; note = 2'-deoxy-2'-fluoroadenosine-3'-phosphate
  modified_base 7: mod_base = OTHER; note = 2'-O-methyluridine-3'-phosphate
  modified_base 8: mod_base = OTHER; note = 2'-deoxy-2'-fluorouridine-3'-phosphate
  modified_base 9: mod_base = OTHER; note = 2'-deoxy-2'-fluoroguanosine-3'-phosphate
  modified_base 10: mod_base = OTHER; note = 2'-O-methyluridine-3'-phosphate
  modified_base 11: mod_base = OTHER; note = 2'-O-methyluridine-3'-phosphate
  modified_base 12: mod_base = OTHER; note = 2'-O-methyluridine-3'-phosphate
  modified_base 13: mod_base = OTHER; note = 2'-O-methylcytidine-3'-phosphate
  modified_base 14: mod_base = OTHER; note = 2'-deoxy-2'-fluorouridine-3'-phosphate
  modified_base 15: mod_base = OTHER; note = 2'-O-methylguanosine-3'-phosphate
  modified_base 16: mod_base = OTHER; note = 2'-deoxy-2'-fluoroguanosine-3'-phosphate
  modified_base 17: mod_base = OTHER; note = 2'-O-methyluridine-3'-phosphate
  modified_base 18: mod_base = OTHER; note = 2'-O-methyluridine-3'-phosphate
  modified_base 19: mod_base = OTHER; note = 2'-O-methylcytidine-3'-phosphate
  modified_base 20: mod_base = OTHER; note = 2'-O-methyluridine-3'-phosphate
  modified_base 21: mod_base = OTHER; note = 2'-O-methylcytidine-3'-phosphorothioate
  modified_base 22: mod_base = OTHER; note = 2'-O-methyluridine-3'-phosphorothioate
  modified_base 23: mod_base = OTHER; note = 2'-O-methyluridine
atggcattgtttctggttctctt

SEQ ID NO: 811 - RNA, 23 nt, synthetic construct
  source 1..23: mol_type = other RNA
atccgagccgttctctacaatta

SEQ ID NO: 812 - RNA, 23 nt, synthetic construct
  source 1..23: mol_type = other RNA
cagagaaattctactacatctat

SEQ ID NO: 813 - RNA, 23 nt, synthetic construct
  source 1..23: mol_type = other RNA
agagaaattctactacatctata

SEQ ID NO: 814 - RNA, 23 nt, synthetic construct
  source 1..23: mol_type = other RNA
gaaaatgagggtttcacagtcac

SEQ ID NO: 815 - RNA, 23 nt, synthetic construct
  source 1..23: mol_type = other RNA
cgctgggaggaccctggtaagca

SEQ ID NO: 816 - RNA, 23 nt, synthetic construct
  source 1..23: mol_type = other RNA
ggctaccctactctgttgttcga

SEQ ID NO: 817 - RNA, 23 nt, synthetic construct
  source 1..23: mol_type = other RNA
caatgtaccatgctaaggccaaa

SEQ ID NO: 818 - RNA, 23 nt, synthetic construct
  source 1..23: mol_type = other RNA
aactagtgctgtccagtgagaag

SEQ ID NO: 819 - RNA, 23 nt, synthetic construct
  source 1..23: mol_type = other RNA
ccaccaggaactgaaccttgatg

SEQ ID NO: 820 - RNA, 23 nt, synthetic construct
  source 1..23: mol_type = other RNA
aacaccctcatcatctacctgga

SEQ ID NO: 821 - RNA, 23 nt, synthetic construct
  source 1..23: mol_type = other RNA
gcagagcgggtacctcttcatcc

SEQ ID NO: 822 - RNA, 23 nt, synthetic construct
  source 1..23: mol_type = other RNA
gcagagcgggtacctcttcatcc

SEQ ID NO: 823 - RNA, 23 nt, synthetic construct
  source 1..23: mol_type = other RNA
gcagagcgggtacctcttcatcc

SEQ ID NO: 824 - RNA, 23 nt, synthetic construct
  source 1..23: mol_type = other RNA
ggggaggttgtgctgagccggaa

SEQ ID NO: 825 - RNA, 23 nt, synthetic construct
  source 1..23: mol_type = other RNA
caacatgggccagtggaagatcc

SEQ ID NO: 826 - RNA, 23 nt, synthetic construct
  source 1..23: mol_type = other RNA
cagtgggagaagttcggcctaga

SEQ ID NO: 827 - RNA, 23 nt, synthetic construct
  source 1..23: mol_type = other RNA
ctccttgtcttctcagaaccagc

SEQ ID NO: 828 - RNA, 23 nt, synthetic construct
  source 1..23: mol_type = other RNA
tgtgtacaagacccgactggtca

SEQ ID NO: 829 - RNA, 23 nt, synthetic construct
  source 1..23: mol_type = other RNA
agtacgtgctgcccagtttcgag

SEQ ID NO: 830 - RNA, 23 nt, synthetic construct
  source 1..23: mol_type = other RNA
agaccaggatgccactatgtcta

SEQ ID NO: 831 - RNA, 23 nt, synthetic construct
  source 1..23: mol_type = other RNA
tgttcgtgctgaataagaagaac

SEQ ID NO: 832 - RNA, 23 nt, synthetic construct
  source 1..23: mol_type = other RNA
tacagagaaattctactacatct

SEQ ID NO: 833 - RNA, 23 nt, synthetic construct
  source 1..23: mol_type = other RNA
ccctactgcagctaaaagacttt

SEQ ID NO: 834 - RNA, 23 nt, synthetic construct
  source 1..23: mol_type = other RNA
aagagaaccagaaacaatgccag

SEQ ID NO: 835 - RNA, 23 nt, synthetic construct
  source 1..23: mol_type = other RNA
caatgtaccatgctaaggccaaa

SEQ ID NO: 836 - RNA, 23 nt, synthetic construct
  source 1..23: mol_type = other RNA
ctcccgtcgtgcgttggctcaat

SEQ ID NO: 837 - RNA, 23 nt, synthetic construct
  source 1..23: mol_type = other RNA
aactagtgctgtccagtgagaag

SEQ ID NO: 838 - RNA, 23 nt, synthetic construct
  source 1..23: mol_type = other RNA
gaaaatgagggtttcacagtcac

SEQ ID NO: 839 - RNA, 23 nt, synthetic construct
  source 1..23: mol_type = other RNA
cgtgggcaactccaacaattacc

SEQ ID NO: 840 - RNA, 23 nt, synthetic construct
  source 1..23: mol_type = other RNA
catgctaaggccaaagatcaact

SEQ ID NO: 841 - RNA, 23 nt, synthetic construct
  source 1..23: mol_type = other RNA
cctgcgatcagaagagaccaagg

SEQ ID NO: 842 - RNA, 23 nt, synthetic construct
  source 1..23: mol_type = other RNA
cagacagacaagaccatctacac

SEQ ID NO: 843 - RNA, 23 nt, synthetic construct
  source 1..23: mol_type = other RNA
cagtaatgcaggacttcttcatc

SEQ ID NO: 844 - RNA, 23 nt, synthetic construct
  source 1..23: mol_type = other RNA
ccaccaggaactgaaccttgatg

SEQ ID NO: 845 - RNA, 23 nt, synthetic construct
  source 1..23: mol_type = other RNA
gtcgtgcgttggctcaatgaaca

SEQ ID NO: 846 - RNA, 23 nt, synthetic construct
  source 1..23: mol_type = other RNA
ggagtggactatgtgtacaagac

SEQ ID NO: 847 - RNA, 23 nt, synthetic construct
  source 1..23: mol_type = other RNA
agtacgtgctgcccagtttcgag

SEQ ID NO: 848 - RNA, 23 nt, synthetic construct
  source 1..23: mol_type = other RNA
ggctaccctactctgttgttcga

SEQ ID NO: 849 - RNA, 23 nt, synthetic construct
  source 1..23: mol_type = other RNA
gggtacctcttcatccagacaga

SEQ ID NO: 850 - RNA, 23 nt, synthetic construct
  source 1..23: mol_type = other RNA
cccaccgtatccactgggaatct

SEQ ID NO: 851 - RNA, 23 nt, synthetic construct
  source 1..23: mol_type = other RNA
cgtgttcgtgctgaataagaaga

SEQ ID NO: 852 - RNA, 23 nt, synthetic construct
  source 1..23: mol_type = other RNA
aacattgagaacccggaaggcat

SEQ ID NO: 853 - RNA, 23 nt, synthetic construct
  source 1..23: mol_type = other RNA
gggcctcttcttaacaaatttct

SEQ ID NO: 854 - RNA, 23 nt, synthetic construct
  source 1..23: mol_type = other RNA
agtggactatgtgtacaagaccc

SEQ ID NO: 855 - RNA, 23 nt, synthetic construct
  source 1..23: mol_type = other RNA
cgctgggaggaccctggtaagca

SEQ ID NO: 856 - RNA, 23 nt, synthetic construct
  source 1..23: mol_type = other RNA
ggggaggttgtgctgagccggaa

SEQ ID NO: 857 - RNA, 23 nt, synthetic construct
  source 1..23: mol_type = other RNA
caactacatgaacctacagagat

SEQ ID NO: 858 - RNA, 23 nt, synthetic construct
  source 1..23: mol_type = other RNA
ctccttgtcttctcagaaccagc

SEQ ID NO: 859 - RNA, 23 nt, synthetic construct
  source 1..23: mol_type = other RNA
agaccaggatgccactatgtcta

SEQ ID NO: 860 - RNA, 23 nt, synthetic construct
  source 1..23: mol_type = other RNA
gtgcaggcagagcgcagcgggat

SEQ ID NO: 861 - RNA, 23 nt, synthetic construct
  source 1..23: mol_type = other RNA
aacaccctcatcatctacctgga

SEQ ID NO: 862 - RNA, 23 nt, synthetic construct
  source 1..23: mol_type = other RNA
taccagatccacttcaccaagac

SEQ ID NO: 863 - RNA, 23 nt, synthetic construct
  source 1..23: mol_type = other RNA
caacatgggccagtggaagatcc

SEQ ID NO: 864 - RNA, 23 nt, synthetic construct
  source 1..23: mol_type = other RNA
gaccacagccaaagataagaacc

SEQ ID NO: 865 - RNA, 23 nt, synthetic construct
  source 1..23: mol_type = other RNA
tgtgtacaagacccgactggtca

SEQ ID NO: 866 - RNA, 23 nt, synthetic construct
  source 1..23: mol_type = other RNA
cagtgggagaagttcggcctaga

SEQ ID NO: 867 - RNA, 23 nt, synthetic construct
  source 1..23: mol_type = other RNA
gcagagcgggtacctcttcatcc

SEQ ID NO: 868 - RNA, 23 nt, synthetic construct
  source 1..23: mol_type = other RNA
gtcaaggtctacgcctattacaa

SEQ ID NO: 869 - RNA, 23 nt, synthetic construct
  source 1..23: mol_type = other RNA
gtgctgaggagaattgcttcata

SEQ ID NO: 870 - RNA, 23 nt, synthetic construct
  source 1..23: mol_type = other RNA
gggtacctcttcatccagacaga

SEQ ID NO: 871 - RNA, 23 nt, synthetic construct
  source 1..23: mol_type = other RNA
cagacagacaagaccatctacac

SEQ ID NO: 872 - RNA, 23 nt, synthetic construct
  source 1..23: mol_type = other RNA
aacattgagaacccggaaggcat

SEQ ID NO: 873 - RNA, 23 nt, synthetic construct
  source 1..23: mol_type = other RNA
tacagagaaattctactacatct

SEQ ID NO: 874 - RNA, 23 nt, synthetic construct
  source 1..23: mol_type = other RNA
cagagaaattctactacatctat

SEQ ID NO: 875 - RNA, 23 nt, synthetic construct
  source 1..23: mol_type = other RNA
agagaaattctactacatctata

SEQ ID NO: 876 - RNA, 23 nt, synthetic construct
  source 1..23: mol_type = other RNA
gtgcaggcagagcgcagcgggat

SEQ ID NO: 877 - RNA, 23 nt, synthetic construct
  source 1..23: mol_type = other RNA
taccagatccacttcaccaagac

SEQ ID NO: 878 - RNA, 23 nt, synthetic construct
  source 1..23: mol_type = other RNA
cgtgggcaactccaacaattacc

SEQ ID NO: 879 - RNA, 23 nt, synthetic construct
  source 1..23: mol_type = other RNA
cgtgttcgtgctgaataagaaga

SEQ ID NO: 880 - RNA, 23 nt, synthetic construct
  source 1..23: mol_type = other RNA
tgttcgtgctgaataagaagaac

SEQ ID NO: 881 - RNA, 23 nt, synthetic construct
  source 1..23: mol_type = other RNA
cagtaatgcaggacttcttcatc

SEQ ID NO: 882 - RNA, 23 nt, synthetic construct
  source 1..23: mol_type = other RNA
atccgagccgttctctacaatta

SEQ ID NO: 883 - RNA, 23 nt, synthetic construct
  source 1..23: mol_type = other RNA
caactacatgaacctacagagat

SEQ ID NO: 884 - RNA, 23 nt, synthetic construct
  source 1..23: mol_type = other RNA
gggcctcttcttaacaaatttct

SEQ ID NO: 885 - RNA, 23 nt, synthetic construct
  source 1..23: mol_type = other RNA
gaccacagccaaagataagaacc

SEQ ID NO: 886 - RNA, 23 nt, synthetic construct
  source 1..23: mol_type = other RNA
ccctactgcagctaaaagacttt

SEQ ID NO: 887 - RNA, 23 nt, synthetic construct
  source 1..23: mol_type = other RNA
ctcccgtcgtgcgttggctcaat

SEQ ID NO: 888 - RNA, 23 nt, synthetic construct
  source 1..23: mol_type = other RNA
gtcgtgcgttggctcaatgaaca

SEQ ID NO: 889 - RNA, 23 nt, synthetic construct
  source 1..23: mol_type = other RNA
cccaccgtatccactgggaatct

SEQ ID NO: 890 - RNA, 23 nt, synthetic construct
  source 1..23: mol_type = other RNA
cctgcgatcagaagagaccaagg

SEQ ID NO: 891 - RNA, 23 nt, synthetic construct
  source 1..23: mol_type = other RNA
catgctaaggccaaagatcaact

SEQ ID NO: 892 - RNA, 23 nt, synthetic construct
  source 1..23: mol_type = other RNA
gtcaaggtctacgcctattacaa

SEQ ID NO: 893 - RNA, 23 nt, synthetic construct
  source 1..23: mol_type = other RNA
gtcaaggtctacgcctattacaa

SEQ ID NO: 894 - RNA, 23 nt, synthetic construct
  source 1..23: mol_type = other RNA
gtcaaggtctacgcctattacaa

SEQ ID NO: 895 - RNA, 23 nt, synthetic construct
  source 1..23: mol_type = other RNA
gtgctgaggagaattgcttcata

SEQ ID NO: 896 - RNA, 23 nt, synthetic construct
  source 1..23: mol_type = other RNA
gtgctgaggagaattgcttcata

SEQ ID NO: 897 - RNA, 23 nt, synthetic construct
  source 1..23: mol_type = other RNA
gtgctgaggagaattgcttcata

SEQ ID NO: 898 - RNA, 23 nt, synthetic construct
  source 1..23: mol_type = other RNA
ggagtggactatgtgtacaagac

SEQ ID NO: 899 - RNA, 23 nt, synthetic construct
  source 1..23: mol_type = other RNA
agtggactatgtgtacaagaccc

SEQ ID NO: 900 - RNA, 23 nt, synthetic construct
  source 1..23: mol_type = other RNA
aagagaaccagaaacaatgccag

SEQ ID NO: 901 - DNA, 5148 bp, Homo sapiens
  source 1..5148: mol_type = genomic DNA
agataaaaagccagctccagcaggcgctgctcactcctccccatcctctccctctgtccctctgtccctctgaccctgcactgtcccagcaccatgggacccacctcaggtcccagcctgctgctcctgctactaacccacctccccctggctctggggagtcccatgtactctatcatcacccccaacatcttgcggctggagagcgaggagaccatggtgctggaggcccacgacgcgcaaggggatgttccagtcactgttactgtccacgacttcccaggcaaaaaactagtgctgtccagtgagaagactgtgctgacccctgccaccaaccacatgggcaacgtcaccttcacgatcccagccaacagggagttcaagtcagaaaaggggcgcaacaagttcgtgaccgtgcaggccaccttcgggacccaagtggtggagaaggtggtgctggtcagcctgcagagcgggtacctcttcatccagacagacaagaccatctacacccctggctccacagttctctatcggatcttcaccgtcaaccacaagctgctacccgtgggccggacggtcatggtcaacattgagaacccggaaggcatcccggtcaagcaggactccttgtcttctcagaaccagcttggcgtcttgcccttgtcttgggacattccggaactcgtcaacatgggccagtggaagatccgagcctactatgaaaactcaccacagcaggtcttctccactgagtttgaggtgaaggagtacgtgctgcccagtttcgaggtcatagtggagcctacagagaaattctactacatctataacgagaagggcctggaggtcaccatcaccgccaggttcctctacgggaagaaagtggagggaactgcctttgtcatcttcgggatccaggatggcgaacagaggatttccctgcctgaatccctcaagcgcattccgattgaggatggctcgggggaggttgtgctgagccggaaggtactgctggacggggtgcagaacccccgagcagaagacctggtggggaagtctttgtacgtgtctgccaccgtcatcttgcactcaggcagtgacatggtgcaggcagagcgcagcgggatccccatcgtgacctctccctaccagatccacttcaccaagacacccaagtacttcaaaccaggaatgccctttgacctcatggtgttcgtgacgaaccctgatggctctccagcctaccgagtccccgtggcagtccagggcgaggacactgtgcagtctctaacccagggagatggcgtggccaaactcagcatcaacacacaccccagccagaagcccttgagcatcacggtgcgcacgaagaagcaggagctctcggaggcagagcaggctaccaggaccatgcaggctctgccctacagcaccgtgggcaactccaacaattacctgcatctctcagtgctacgtacagagctcagacccggggagaccctcaacgtcaacttcctcctgcgaatggaccgcgcccacgaggccaagatccgctactacacctacctgatcatgaacaagggcaggctgttgaaggcgggacgccaggtgcgagagcccggccaggacctggtggtgctgcccctgtccatcaccaccgacttcatcccttccttccgcctggtggcgtactacacgctgatcggtgccagcggccagagggaggtggtggccgactccgtgtgggtggacgtcaaggactcctgcgtgggctcgctggtggtaaaaagcggccagtcagaagaccggcagcctgtacctgggcagcagatgaccctgaagatagagggtgaccacggggcccgggtggtactggtggccgtggacaagggcgtgttcgtgctgaataagaagaacaaactgacgcagagtaagatctgggacgtggtggagaaggcagacatcggctgcaccccgggcagtgggaaggattacgccggtgtcttctccgacgcagggctgaccttcacgagcagcagtggccagcagaccgcccagagggcagaacttcagtgcccgcagccagccgcccgccgacgccgttccgtgcagctcacggagaagcgaatggacaaagtcggcaagtaccccaaggagctgcgcaagtgctgcgaggacggcatgcgggagaaccccatgaggttctcgtgccagcgccggacccgtttcatctccctgggcgaggcgtgcaagaaggtcttcctggactgctgcaactacatcacagagctgcggcggcagcacgcgcgggccagccacctgggcctggccaggagtaacctggatgaggacatcattgcagaagagaacatcgtttcccgaagtgagttcccagagagctggctgtggaacgttgaggacttgaaagagccaccgaaaaatggaatctctacgaagctcatgaatatatttttgaaagactccatcaccacgtgggagattctggctgtgagcatgtcggacaagaaagggatctgtgtggcagaccccttcgaggtcacagtaatgcaggacttcttcatcgacctgcggctaccctactctgttgttcgaaacgagcaggtggaaatccgagccgttctctacaattaccggcagaaccaagagctcaaggtgagggtggaactactccacaatccagccttctgcagcctggccaccaccaagaggcgtcaccagcagaccgtaaccatcccccccaagtcctcgttgtccgttccatatgtcatcgtgccgctaaagaccggcctgcaggaagtggaagtcaaggctgctgtctaccatcatttcatcagtgacggtgtcaggaagtccctgaaggtcgtgccggaaggaatcagaatgaacaaaactgtggctgttcgcaccctggatccagaacgcctgggccgtgaaggagtgcagaaagaggacatcccacctgcagacctcagtgaccaagtcccggacaccgagtctgagaccagaattctcctgcaagggaccccagtggcccagatgacagaggatgccgtcgacgcggaacggctgaagcacctcattgtgaccccctcgggctgcggggaacagaacatgatcggcatgacgcccacggtcatcgctgtgcattacctggatgaaacggagcagtgggagaagttcggcctagagaagcggcagggggccttggagctcatcaagaaggggtacacccagcagctggccttcagacaacccagctctgcctttgcggccttcgtgaaacgggcacccagcacctggctgaccgcctacgtggtcaaggtcttctctctggctgtcaacctcatcgccatcgactcccaagtcctctgcggggctgttaaatggctgatcctggagaagcagaagcccgacggggtcttccaggaggatgcgcccgtgatacaccaagaaatgattggtggattacggaacaacaacgagaaagacatggccctcacggcctttgttctcatctcgctgcaggaggctaaagatatttgcgaggagcaggtcaacagcctgccaggcagcatcactaaagcaggagacttccttgaagccaactacatgaacctacagagatcctacactgtggccattgctggctatgctctggcccagatgggcaggctgaaggggcctcttcttaacaaatttctgaccacagccaaagataagaaccgctgggaggaccctggtaagcagctctacaacgtggaggccacatcctatgccctcttggccctactgcagctaaaagactttgactttgtgcctcccgtcgtgcgttggctcaatgaacagagatactacggtggtggctatggctctacccaggccaccttcatggtgttccaagccttggctcaataccaaaaggacgcccctgaccaccaggaactgaaccttgatgtgtccctccaactgcccagccgcagctccaagatcacccaccgtatccactgggaatctgccagcctcctgcgatcagaagagaccaaggaaaatgagggtttcacagtcacagctgaaggaaaaggccaaggcaccttgtcggtggtgacaatgtaccatgctaaggccaaagatcaactcacctgtaataaattcgacctcaaggtcaccataaaaccagcaccggaaacagaaaagaggcctcaggatgccaagaacactatgatccttgagatctgtaccaggtaccggggagaccaggatgccactatgtctatattggacatatccatgatgactggctttgctccagacacagatgacctgaagcagctggccaatggtgttgacagatacatctccaagtatgagctggacaaagccttctccgataggaacaccctcatcatctacctggacaaggtctcacactctgaggatgactgtctagctttcaaagttcaccaatactttaatgtagagcttatccagcctggagcagtcaaggtctacgcctattacaacctggaggaaagctgtacccggttctaccatccggaaaaggaggatggaaagctgaacaagctctgccgtgatgaactgtgccgctgtgctgaggagaattgcttcatacaaaagtcggatgacaaggtcaccctggaagaacggctggacaaggcctgtgagccaggagtggactatgtgtacaagacccgactggtcaaggttcagctgtccaatgactttgacgagtacatcatggccattgagcagaccatcaagtcaggctcggatgaggtgcaggttggacagcagcgcacgttcatcagccccatcaagtgcagagaagccctgaagctggaggagaagaaacactacctcatgtggggtctctcctccgatttctggggagagaagcccaacctcagctacatcatcgggaaggacacttgggtggagcactggcccgaggaggacgaatgccaagacgaagagaaccagaaacaatgccaggacctcggcgccttcaccgagagcatggttgtctttgggtgccccaactgaccacacccccattcccccactccagataaagcttcagttatatctcaaaaaaaaaaaaaaaaa

SEQ ID NO: 902 - DNA, 5148 bp, Homo sapiens; identical to SEQ ID NO: 901
  source 1..5148: mol_type = genomic DNA

SEQ ID NO: 903 - DNA, 5139 bp, Mus musculus
  source 1..5139: mol_type = genomic DNA
agagaggagagccatataaagagccagcggctacagccccagctcgcctctgcccacccctgccccttaccccttcattccttccacctttttccttcactatgggaccagcttcagggtcccagctactagtgctactgctgctgttggccagctccccattagctctggggatccccatgtattccatcattactcccaatgtcctacggctggagagcgaagagaccatcgtactggaggcccacgatgctcagggtgacatcccagtcacagtcactgtgcaagacttcctaaagaggcaagtgctgaccagtgagaagacagtgttgacaggagccagtggacatctgagaagcgtctccatcaagattccagccagtaaggaattcaactcagataaggaggggcacaagtacgtgacagtggtggcaaacttcggggaaacggtggtggagaaagcagtgatggtaagcttccagagtgggtacctcttcatccagacagacaagaccatctacacccctggctccactgtcttatatcggatcttcactgtggacaacaacctactgcccgtgggcaagacagtcgtcatcctcattgagacccccgatggcattcctgtcaagagagacattctgtcttccaacaaccaacacggcatcttgcctttgtcttggaacattcctgaactggtcaacatggggcagtggaagatccgagccttttacgaacatgcgccgaagcagatcttctccgcagagtttgaggtgaaggaatacgtgctgcccagttttgaggtccgggtggagcccacagagacattttattacatcgatgacccaaatggcctggaagtttccatcatagccaagttcctgtacgggaaaaacgtggacgggacagccttcgtgatttttggggtccaggatggcgataagaagatttctctggcccactccctcacgcgcgtagtgattgaggatggtgtgggggatgcagtgctgacccggaaggtgctgatggagggggtacggccttccaacgccgacgccctggtggggaagtccctgtatgtctccgtcactgtcatcctgcactcaggtagtgacatggtagaggcagagcgcagtgggatcccgattgtcacttccccgtaccagatccacttcaccaagacacccaaattcttcaagccagccatgccctttgacctcatggtgttcgtgaccaaccccgatggctctccggccagcaaagtgctggtggtcactcagggatctaatgcaaaggctctcacccaagatgatggcgtggccaagctaagcatcaacacacccaacagccgccaacccctgaccatcacagtccgcaccaagaaggacactctcccagaatcacggcaggccaccaagacaatggaggcccatccctacagcactatgcacaactccaacaactacctacacttgtcagtgtcacgaatggagctcaagccgggggacaacctcaatgtcaacttccacctgcgcacagacccaggccatgaggccaagatccgatactacacctacctggttatgaacaaggggaagctcctgaaggcaggccgccaggttcgggagcctggccaggacctggtggtcttgtccctgcccatcactccagagtttattccttcatttcgcctggtggcttactacaccctgattggagctagtggccagagggaggtggtggctgactctgtgtgggtggatgtgaaggattcctgtattggcacgctggtggtgaagggtgacccaagagataaccatctcgcacctgggcaacaaacgacactcaggattgaaggaaaccagggggcccgagtggggctagtggctgtggacaagggagtgtttgtgctgaacaagaagaacaaactcacacagagcaagatctgggatgtggtagagaaggcagacattggctgcaccccaggcagtgggaagaactatgctggtgtcttcatggatgcaggcctggccttcaagacaagccaaggactgcagactgaacagagagcagatcttgagtgcaccaagccagcagcccgccgccgtcgctcagtacagttgatggaaagaaggatggacaaagctggtcagtacactgacaagggtcttcggaagtgttgtgaggatggtatgcgggatatccctatgagatacagctgccagcgccgggcacgcctcatcacccagggcgagaactgcataaaggccttcatagactgctgcaaccacatcaccaagctgcgtgaacaacacagaagagaccacgtgctgggcctggccaggagtgaattggaggaagacataattccagaagaagatattatctctagaagccacttcccacagagctggttgtggaccatagaagagttgaaagaaccagagaaaaatggaatctctacgaaggtcatgaacatctttctcaaagattccatcaccacctgggagattctggcagtgagcttgtcagacaagaaagggatctgtgtggcagacccctatgagatcagagtgatgcaggacttcttcattgacctgcggctgccctactctgtagtgcgcaacgaacaggtggagatcagagctgtgctcttcaactaccgtgaacaggaggaacttaaggtgagggtggaactgttgcataatccagccttctgcagcatggccaccgccaagaatcgctacttccagaccatcaaaatccctcccaagtcctcggtggctgtaccgtatgtcattgtccccttgaagatcggccaacaagaggtggaggtcaaggctgctgtcttcaatcacttcatcagtgatggtgtcaagaagacactgaaggtcgtgccagaaggaatgagaatcaacaaaactgtggccatccatacactggacccagagaagctcggtcaagggggagtgcagaaggtggatgtgcctgccgcagaccttagcgaccaagtgccagacacagactctgagaccagaattatcctgcaagggagcccggtggttcagatggctgaagatgctgtggacggggagcggctgaaacacctgatcgtgacccccgcaggctgtggggaacagaacatgattggcatgacaccaacagtcattgcggtacactacctggaccagaccgaacagtgggagaagttcggcatagagaagaggcaagaggccctggagctcatcaagaaagggtacacccagcagctggccttcaaacagcccagctctgcctatgctgccttcaacaaccggccccccagcacctggctgacagcctacgtggtcaaggtcttctctctagctgccaacctcatcgccatcgactctcacgtcctgtgtggggctgttaaatggttgattctggagaaacagaagccggatggtgtctttcaggaggatgggcccgtgattcaccaagaaatgattggtggcttccggaacgccaaggaggcagatgtgtcactcacagccttcgtcctcatcgcactgcaggaagccagggacatctgtgaggggcaggtcaatagccttcctgggagcatcaacaaggcaggggagtatattgaagccagttacatgaacctgcagagaccatacacagtggccattgctgggtatgccctggccctgatgaacaaactggaggaaccttacctcggcaagtttctgaacacagccaaagatcggaaccgctgggaggagcctgaccagcagctctacaacgtagaggccacatcctacgccctcctggccctgctgctgctgaaagactttgactctgtgccccctgtagtgcgctggctcaatgagcaaagatactacggaggcggctatggctccacccaggctaccttcatggtattccaagccttggcccaatatcaaacagatgtccctgaccataaggacttgaacatggatgtgtccttccacctccccagccgtagctctgcaaccacgtttcgcctgctctgggaaaatggcaacctcctgcgatcggaagagaccaagcaaaatgaggccttctctctaacagccaaaggaaaaggccgaggcacattgtcggtggtggcagtgtatcatgccaaactcaaaagcaaagtcacctgcaagaagtttgacctcagggtcagcataagaccagcccctgagacagccaagaagcccgaggaagccaagaataccatgttccttgaaatctgcaccaagtacttgggagatgtggacgccactatgtccatcctggacatctccatgatgactggctttgctccagacacaaaggacctggaactgctggcctctggagtagatagatacatctccaagtacgagatgaacaaagccttctccaacaagaacaccctcatcatctacctagaaaagatttcacacaccgaagaagactgcctgaccttcaaagttcaccagtactttaatgtgggacttatccagcccgggtcggtcaaggtctactcctattacaacctcgaggaatcatgcacccggttctatcatccagagaaggacgatgggatgctcagcaagctgtgccacagtgaaatgtgccggtgtgctgaagagaactgcttcatgcaacagtcacaggagaagatcaacctgaatgtccggctagacaaggcttgtgagcccggagtcgactatgtgtacaagaccgagctaaccaacatagagctgttggatgattttgatgagtacaccatgaccatccagcaggtcatcaagtcaggctcagatgaggtgcaggcagggcagcaacgcaagttcatcagccacatcaagtgcagaaacgccctgaagctgcagaaagggaagaagtacctcatgtggggcctctcctctgacctctggggagaaaagcccaacaccagctacatcattgggaaggacacgtgggtggagcactggcctgaggcagaagaatgccaggatcagaagtaccagaaacagtgcgaagaacttggggcattcacagaatctatggtggtttatggttgtcccaactgactacagcccagccctctaataaagcttcagttgtatttcacccatc

SEQ ID NO: 904 - DNA, 5139 bp, Mus musculus
  source 1..5139: mol_type = genomic DNA
gatgggtgaaatacaactgaagctttattagagggctgggctgtagtcagttgggacaaccataaaccaccatagattctgtgaatgccccaagttcttcgcactgtttctggtacttctgatcctggcattcttctgcctcaggccagtgctccacccacgtgtccttcccaatgatgtagctggtgttgggcttttctccccagaggtcagaggagaggccccacatgaggtacttcttccctttctgcagcttcagggcgtttctgcacttgatgtggctgatgaacttgcgttgctgccctgcctgcacctcatctgagcctgacttgatgacctgctggatggtcatggtgtactcatcaaaatcatccaacagctctatgttggttagctcggtcttgtacacatagtcgactccgggctcacaagccttgtctagccggacattcaggttgatcttctcctgtgactgttgcatgaagcagttctcttcagcacaccggcacatttcactgtggcacagcttgctgagcatcccatcgtccttctctggatgatagaaccgggtgcatgattcctcgaggttgtaataggagtagaccttgaccgacccgggctggataagtcccacattaaagtactggtgaactttgaaggtcaggcagtcttcttcggtgtgtgaaatcttttctaggtagatgatgagggtgttcttgttggagaaggctttgttcatctcgtacttggagatgtatctatctactccagaggccagcagttccaggtcctttgtgtctggagcaaagccagtcatcatggagatgtccaggatggacatagtggcgtccacatctcccaagtacttggtgcagatttcaaggaacatggtattcttggcttcctcgggcttcttggctgtctcaggggctggtcttatgctgaccctgaggtcaaacttcttgcaggtgactttgcttttgagtttggcatgatacactgccaccaccgacaatgtgcctcggccttttcctttggctgttagagagaaggcctcattttgcttggtctcttccgatcgcaggaggttgccattttcccagagcaggcgaaacgtggttgcagagctacggctggggaggtggaaggacacatccatgttcaagtccttatggtcagggacatctgtttgatattgggccaaggcttggaataccatgaaggtagcctgggtggagccatagccgcctccgtagtatctttgctcattgagccagcgcactacagggggcacagagtcaaagtctttcagcagcagcagggccaggagggcgtaggatgtggcctctacgttgtagagctgctggtcaggctcctcccagcggttccgatctttggctgtgttcagaaacttgccgaggtaaggttcctccagtttgttcatcagggccagggcatacccagcaatggccactgtgtatggtctctgcaggttcatgtaactggcttcaatatactcccctgccttgttgatgctcccaggaaggctattgacctgcccctcacagatgtccctggcttcctgcagtgcgatgaggacgaaggctgtgagtgacacatctgcctccttggcgttccggaagccaccaatcatttcttggtgaatcacgggcccatcctcctgaaagacaccatccggcttctgtttctccagaatcaaccatttaacagccccacacaggacgtgagagtcgatggcgatgaggttggcagctagagagaagaccttgaccacgtaggctgtcagccaggtgctggggggccggttgttgaaggcagcataggcagagctgggctgtttgaaggccagctgctgggtgtaccctttcttgatgagctccagggcctcttgcctcttctctatgccgaacttctcccactgttcggtctggtccaggtagtgtaccgcaatgactgttggtgtcatgccaatcatgttctgttccccacagcctgcgggggtcacgatcaggtgtttcagccgctccccgtccacagcatcttcagccatctgaaccaccgggctcccttgcaggataattctggtctcagagtctgtgtctggcacttggtcgctaaggtctgcggcaggcacatccaccttctgcactcccccttgaccgagcttctctgggtccagtgtatggatggccacagttttgttgattctcattccttctggcacgaccttcagtgtcttcttgacaccatcactgatgaagtgattgaagacagcagccttgacctccacctcttgttggccgatcttcaaggggacaatgacatacggtacagccaccgaggacttgggagggattttgatggtctggaagtagcgattcttggcggtggccatgctgcagaaggctggattatgcaacagttccaccctcaccttaagttcctcctgttcacggtagttgaagagcacagctctgatctccacctgttcgttgcgcactacagagtagggcagccgcaggtcaatgaagaagtcctgcatcactctgatctcataggggtctgccacacagatccctttcttgtctgacaagctcactgccagaatctcccaggtggtgatggaatctttgagaaagatgttcatgaccttcgtagagattccatttttctctggttctttcaactcttctatggtccacaaccagctctgtgggaagtggcttctagagataatatcttcttctggaattatgtcttcctccaattcactcctggccaggcccagcacgtggtctcttctgtgttgttcacgcagcttggtgatgtggttgcagcagtctatgaaggcctttatgcagttctcgccctgggtgatgaggcgtgcccggcgctggcagctgtatctcatagggatatcccgcataccatcctcacaacacttccgaagacccttgtcagtgtactgaccagctttgtccatccttctttccatcaactgtactgagcgacggcggcgggctgctggcttggtgcactcaagatctgctctctgttcagtctgcagtccttggcttgtcttgaaggccaggcctgcatccatgaagacaccagcatagttcttcccactgcctggggtgcagccaatgtctgccttctctaccacatcccagatcttgctctgtgtgagtttgttcttcttgttcagcacaaacactcccttgtccacagccactagccccactcgggccccctggtttccttcaatcctgagtgtcgtttgttgcccaggtgcgagatggttatctcttgggtcacccttcaccaccagcgtgccaatacaggaatccttcacatccacccacacagagtcagccaccacctccctctggccactagctccaatcagggtgtagtaagccaccaggcgaaatgaaggaataaactctggagtgatgggcagggacaagaccaccaggtcctggccaggctcccgaacctggcggcctgccttcaggagcttccccttgttcataaccaggtaggtgtagtatcggatcttggcctcatggcctgggtctgtgcgcaggtggaagttgacattgaggttgtcccccggcttgagctccattcgtgacactgacaagtgtaggtagttgttggagttgtgcatagtgctgtagggatgggcctccattgtcttggtggcctgccgtgattctgggagagtgtccttcttggtgcggactgtgatggtcaggggttggcggctgttgggtgtgttgatgcttagcttggccacgccatcatcttgggtgagagcctttgcattagatccctgagtgaccaccagcactttgctggccggagagccatcggggttggtcacgaacaccatgaggtcaaagggcatggctggcttgaagaatttgggtgtcttggtgaagtggatctggtacggggaagtgacaatcgggatcccactgcgctctgcctctaccatgtcactacctgagtgcaggatgacagtgacggagacatacagggacttccccaccagggcgtcggcgttggaaggccgtaccccctccatcagcaccttccgggtcagcactgcatcccccacaccatcctcaatcactacgcgcgtgagggagtgggccagagaaatcttcttatcgccatcctggaccccaaaaatcacgaaggctgtcccgtccacgtttttcccgtacaggaacttggctatgatggaaacttccaggccatttgggtcatcgatgtaataaaatgtctctgtgggctccacccggacctcaaaactgggcagcacgtattccttcacctcaaactctgcggagaagatctgcttcggcgcatgttcgtaaaaggctcggatcttccactgccccatgttgaccagttcaggaatgttccaagacaaaggcaagatgccgtgttggttgttggaagacagaatgtctctcttgacaggaatgccatcgggggtctcaatgaggatgacgactgtcttgcccacgggcagtaggttgttgtccacagtgaagatccgatataagacagtggagccaggggtgtagatggtcttgtctgtctggatgaagaggtacccactctggaagcttaccatcactgctttctccaccaccgtttccccgaagtttgccaccactgtcacgtacttgtgcccctccttatctgagttgaattccttactggctggaatcttgatggagacgcttctcagatgtccactggctcctgtcaacactgtcttctcactggtcagcacttgcctctttaggaagtcttgcacagtgactgtgactgggatgtcaccctgagcatcgtgggcctccagtacgatggtctcttcgctctccagccgtaggacattgggagtaatgatggaatacatggggatccccagagctaatggggagctggccaacagcagcagtagcactagtagctgggaccctgaagctggtcccatagtgaaggaaaaaggtggaaggaatgaaggggtaaggggcaggggtgggcagaggcgagctggggctgtagccgctggctctttatatggctctcctctct

SEQ ID NO: 905 - DNA, 5091 bp, Rattus norvegicus
  source 1..5091: mol_type = genomic DNA
ctaccccttacccctcactccttccacctttgtcctttaccatgggacccacgtcagggtcccagctactagtgctactgctgctgttggccagctccctgctagctctggggagccccatgtactccatcattactcccaatgtcctgcggctggagagtgaagagactttcatactagaggcccatgatgctcagggtgatgtcccagtcactgtcactgtgcaagacttcctaaagaagcaagtgctgaccagtgagaagacagtgttgacaggagccactggacatctgaacagggtctccatcaagattccagccagtaaggaattcaatgcagataaggggcacaagtacgtgacagtggtggcaaacttcggggcaacagtggtggagaaagcggtgctagtaagctttcagagtggttacctcttcatccagacagacaagaccatctacaccccaggctccactgttttctatcggatcttcactgtggacaacaacctattgcctgtgggcaagacagtcgtcatcgtcattgagaccccggacggcgttcccatcaagagagacattctatcttcccacaaccaatatggcatcttgcctttgtcttggaacattccagaactggtcaacatggggcagtggaagatccgagccttctatgaacatgcaccaaagcagaccttctctgcagagtttgaggtgaaggaatacgtgctgcccagtttcgaagtcctggtggagcctacagagaaattttattacatcgatgacccaaagggcctggaagtttccatcacagccagattcctgtatgggaagaacgtggacgggacagctttcgtgatctttggggtccaggatgaggataagaagatttctctggcccagtccctcacccgcgtgctgatcgaggatggttcaggggaggcagtgctcagccgaaaagtgctgatggacggggtacggccctccagcccagaagccctagtggggaagtccctgtacgtctctgtcactgttatcctgcactcaggtagcgacatggtagaggcagagcgcagtgggatcccaattgtcacttccccgtaccagatccacttcaccaagacacccaaattcttcaagccagccatgcctttcgacctcatggtgtttgtgaccaaccctgatggctctccagcccgcagagtgccagtagtcactcagggatccgacgcgcaggctctcacccaggatgatggtgtggccaagctgagcgtcaacacacccaacaaccgccaacccctgactatcacggtccgcaccaagaaggagggtatcccggacgcgcggcaggccaccaggacgatgcaggcccagccctacagcactatgcacaattccaacaactacctgcacttgtcagtgtctcgggtggagctcaagcctggggacaacctcaatgtcaacttccacctgcgcacggacgctggccaagaggccaagatccgatactacacctatctggttatgaacaaggggaagttactgaaggcaggccgtcaggttcgggagcctggccaggacctggtggtcttgtcactgcccatcactccagaatttataccttccttccgcctggtggcttactacaccctgattggagctaatggccaaagggaggtggtggccgactcagtgtgggtggatgtgaaggactcctgtgtaggcacgctggtggtgaaaggtgacccaagagataaccgacagcccgcgcctgggcatcaaacgacactaaggatcgaggggaaccagggggcccgagtggggctagtggctgtggacaagggggtgtttgtgctgaacaagaagaacaaactcacacagagcaagatctgggatgtagtagagaaggcagacattggctgcaccccaggcagtgggaagaactatgcgggtgtcttcatggatgctggcctgaccttcaagacaaaccaaggcctgcagactgatcagagagaagatcctgagtgcgccaagccagctgcccgccgccgtcgctcagtgcagttgatggaaaggaggatggacaaagctggtcagtacaccgacaagggtctgcggaagtgttgtgaggatggcatgcgtgatatccctatgaagtacagctgccagcgccgggctcgcctcatcacccagggcgagagctgcctgaaggccttcatggactgctgcaactatatcaccaagcttcgtgagcagcacagaagagaccatgtgctgggcctggccaggagtgatgtggatgaagacataatcccagaagaagatattatctctagaagccacttcccagagagctggttgtggaccatagaagagttgaaagaaccagagaaaaatggaatctctacgaaggtcatgaacatctttctcaaagattccatcaccacctgggagattctggcagtgagcttgtccgacaagaaagggatctgtgtggcagacccctatgagatcacagtgatgcaggacttcttcattgacctgcgactgccctactctgtggtgcgcaatgaacaggtggagatcagagctgtgctcttcaattaccgtgaacaggagaaacttaaggtaagggtggaactgttgcataacccagccttctgcagcatggccactgccaagaagcggtactaccagaccatcgaaatccctcccaagtcctctgtggctgtgccttatgtcattgtccccttgaagatcggcctccaggaggtggaggtcaaggccgccgtcttcaaccacttcatcagtgatggtgtcaagaagatactgaaggtcgtgccagaaggaatgagagtcaacaaaactgtggctgtccgtacactggatccagaacacctcggtcaagggggagtgcagagggaggatgtacctgcagcagacctcagtgaccaagtgccagacacagattctgagaccagaattctcctgcaagggaccccggtggctcagatggccgaggacgctgtggacggggagcggctgaaacacctgatcgtgaccccctctggctgtggggagcagaacatgattggcatgacacccacggtcattgcagtacactatctggatcagaccgaacagtgggagaaattcggcctagagaagaggcaagaagctctggagctcatcaagaaagggtacacccagcagctggctttcaaacagcccagctctgcctatgctgccttcaacaaccggcctcccagcacctggctgacagcctatgtggtcaaggtcttctctctggctgccaacctcatcgccatcgactctcaggtcctgtgtggggctgtcaaatggctgattctggagaaacagaagccagatggtgtctttcaggaggacggaccagtgattcaccaagaaatgattggtggcttccggaacaccaaggaggcagatgtgtcgcttacagcctttgtcctcatcgcactgcaggaagccagagatatctgtgaggggcaggtcaacagccttcccgggagcatcaacaaggcaggggagtatcttgaagccagttacctgaacctgcagagaccatacacagtagccattgctgggtatgccctggccctgatgaacaaactggaggaaccttacctcaccaagtttctgaacacagccaaagatcggaaccgctgggaggagcctggccagcagctctacaatgtggaggccacctcctacgccctcctggccctgctgctgctgaaagactttgactctgtgcctcctgtggtgcgctggctcaacgagcaaagatactacggaggtggctatggctccacgcaggctaccttcatggtattccaagccttggctcaataccaaacagatgtccctgaccacaaggacttgaacatggatgtgtccctccacctccccagccgcagctccccaactgtgtttcgcctgctatgggaaagtggcagtctcctgagatcagaagagaccaagcagaatgagggcttttctctgacagccaaaggaaaaggccaaggcacactgtcggtggtgacagtgtatcacgccaaagtcaaaggcaaagccacctgcaagaagtttgacctcagggtcaccataaaaccagcccctgagacagccaagaagccccaggatgccaagagttctatgatccttgacatctgcaccaggtacttgggagacgtggatgctactatgtccatcctggacatctccatgatgactggctttattccagacacaaacgacctggaactgctgagctctggagtagacagatacatttccaagtatgagatggacaaagccttctccaacaagaacaccctcatcatctacctagaaaagatctcacactccgaagaagactgcctgtccttcaaagtccaccagttctttaacgtgggacttatccagccggggtcggtcaaggtctactcctactacaatctagaggagtcatgcacccggttctatcatccggagaaggacgatggaatgctgagcaagctgtgccacaatgaaatgtgccgctgtgcagaggagaactgcttcatgcatcagtcacaggatcaggtcagcctgaatgaacgactagacaaggcttgtgagcctggagtggactacgtgtacaagaccaagctaacgacgatagagctgtcggatgattttgatgagtacatcatgaccatcgagcaggtcatcaagtcaggctcagatgaggtgcaggcaggtcaggaacgaaggttcatcagccacgtcaagtgcagaaacgccctaaagctgcagaaagggaagcagtacctcatgtggggcctctcctccgacctctggggagaaaagcccaataccagctacatcattgggaaggacacgtgggtggagcactggcccgaggcagaggaatgtcaggatcagaagaaccagaaacagtgcgaagacctcggggcattcacagaaacaatggtggttttcggctgccccaactgaccacaacctccaataaagcttcagttgtattttacccatcaaaaaaaaaaaaaaaaaa

SEQ ID NO: 906 - DNA, 5091 bp, Rattus norvegicus
  source 1..5091: mol_type = genomic DNA
ttttttttttttttttttgatgggtaaaatacaactgaagctttattggaggttgtggtcagttggggcagccgaaaaccaccattgtttctgtgaatgccccgaggtcttcgcactgtttctggttcttctgatcctgacattcctctgcctcgggccagtgctccacccacgtgtccttcccaatgatgtagctggtattgggcttttctccccagaggtcggaggagaggccccacatgaggtactgcttccctttctgcagctttagggcgtttctgcacttgacgtggctgatgaaccttcgttcctgacctgcctgcacctcatctgagcctgacttgatgacctgctcgatggtcatgatgtactcatcaaaatcatccgacagctctatcgtcgttagcttggtcttgtacacgtagtccactccaggctcacaagccttgtctagtcgttcattcaggctgacctgatcctgtgactgatgcatgaagcagttctcctctgcacagcggcacatttcattgtggcacagcttgctcagcattccatcgtccttctccggatgatagaaccgggtgcatgactcctctagattgtagtaggagtagaccttgaccgaccccggctggataagtcccacgttaaagaactggtggactttgaaggacaggcagtcttcttcggagtgtgagatcttttctaggtagatgatgagggtgttcttgttggagaaggctttgtccatctcatacttggaaatgtatctgtctactccagagctcagcagttccaggtcgtttgtgtctggaataaagccagtcatcatggagatgtccaggatggacatagtagcatccacgtctcccaagtacctggtgcagatgtcaaggatcatagaactcttggcatcctggggcttcttggctgtctcaggggctggttttatggtgaccctgaggtcaaacttcttgcaggtggctttgcctttgactttggcgtgatacactgtcaccaccgacagtgtgccttggccttttcctttggctgtcagagaaaagccctcattctgcttggtctcttctgatctcaggagactgccactttcccatagcaggcgaaacacagttggggagctgcggctggggaggtggagggacacatccatgttcaagtccttgtggtcagggacatctgtttggtattgagccaaggcttggaataccatgaaggtagcctgcgtggagccatagccacctccgtagtatctttgctcgttgagccagcgcaccacaggaggcacagagtcaaagtctttcagcagcagcagggccaggagggcgtaggaggtggcctccacattgtagagctgctggccaggctcctcccagcggttccgatctttggctgtgttcagaaacttggtgaggtaaggttcctccagtttgttcatcagggccagggcatacccagcaatggctactgtgtatggtctctgcaggttcaggtaactggcttcaagatactcccctgccttgttgatgctcccgggaaggctgttgacctgcccctcacagatatctctggcttcctgcagtgcgatgaggacaaaggctgtaagcgacacatctgcctccttggtgttccggaagccaccaatcatttcttggtgaatcactggtccgtcctcctgaaagacaccatctggcttctgtttctccagaatcagccatttgacagccccacacaggacctgagagtcgatggcgatgaggttggcagccagagagaagaccttgaccacataggctgtcagccaggtgctgggaggccggttgttgaaggcagcataggcagagctgggctgtttgaaagccagctgctgggtgtaccctttcttgatgagctccagagcttcttgcctcttctctaggccgaatttctcccactgttcggtctgatccagatagtgtactgcaatgaccgtgggtgtcatgccaatcatgttctgctccccacagccagagggggtcacgatcaggtgtttcagccgctccccgtccacagcgtcctcggccatctgagccaccggggtcccttgcaggagaattctggtctcagaatctgtgtctggcacttggtcactgaggtctgctgcaggtacatcctccctctgcactcccccttgaccgaggtgttctggatccagtgtacggacagccacagttttgttgactctcattccttctggcacgaccttcagtatcttcttgacaccatcactgatgaagtggttgaagacggcggccttgacctccacctcctggaggccgatcttcaaggggacaatgacataaggcacagccacagaggacttgggagggatttcgatggtctggtagtaccgcttcttggcagtggccatgctgcagaaggctgggttatgcaacagttccacccttaccttaagtttctcctgttcacggtaattgaagagcacagctctgatctccacctgttcattgcgcaccacagagtagggcagtcgcaggtcaatgaagaagtcctgcatcactgtgatctcataggggtctgccacacagatccctttcttgtcggacaagctcactgccagaatctcccaggtggtgatggaatctttgagaaagatgttcatgaccttcgtagagattccatttttctctggttctttcaactcttctatggtccacaaccagctctctgggaagtggcttctagagataatatcttcttctgggattatgtcttcatccacatcactcctggccaggcccagcacatggtctcttctgtgctgctcacgaagcttggtgatatagttgcagcagtccatgaaggccttcaggcagctctcgccctgggtgatgaggcgagcccggcgctggcagctgtacttcatagggatatcacgcatgccatcctcacaacacttccgcagacccttgtcggtgtactgaccagctttgtccatcctcctttccatcaactgcactgagcgacggcggcgggcagctggcttggcgcactcaggatcttctctctgatcagtctgcaggccttggtttgtcttgaaggtcaggccagcatccatgaagacacccgcatagttcttcccactgcctggggtgcagccaatgtctgccttctctactacatcccagatcttgctctgtgtgagtttgttcttcttgttcagcacaaacacccccttgtccacagccactagccccactcgggccccctggttcccctcgatccttagtgtcgtttgatgcccaggcgcgggctgtcggttatctcttgggtcacctttcaccaccagcgtgcctacacaggagtccttcacatccacccacactgagtcggccaccacctccctttggccattagctccaatcagggtgtagtaagccaccaggcggaaggaaggtataaattctggagtgatgggcagtgacaagaccaccaggtcctggccaggctcccgaacctgacggcctgccttcagtaacttccccttgttcataaccagataggtgtagtatcggatcttggcctcttggccagcgtccgtgcgcaggtggaagttgacattgaggttgtccccaggcttgagctccacccgagacactgacaagtgcaggtagttgttggaattgtgcatagtgctgtagggctgggcctgcatcgtcctggtggcctgccgcgcgtccgggataccctccttcttggtgcggaccgtgatagtcaggggttggcggttgttgggtgtgttgacgctcagcttggccacaccatcatcctgggtgagagcctgcgcgtcggatccctgagtgactactggcactctgcgggctggagagccatcagggttggtcacaaacaccatgaggtcgaaaggcatggctggcttgaagaatttgggtgtcttggtgaagtggatctggtacggggaagtgacaattgggatcccactgcgctctgcctctaccatgtcgctacctgagtgcaggataacagtgacagagacgtacagggacttccccactagggcttctgggctggagggccgtaccccgtccatcagcacttttcggctgagcactgcctcccctgaaccatcctcgatcagcacgcgggtgagggactgggccagagaaatcttcttatcctcatcctggaccccaaagatcacgaaagctgtcccgtccacgttcttcccatacaggaatctggctgtgatggaaacttccaggccctttgggtcatcgatgtaataaaatttctctgtaggctccaccaggacttcgaaactgggcagcacgtattccttcacctcaaactctgcagagaaggtctgctttggtgcatgttcatagaaggctcggatcttccactgccccatgttgaccagttctggaatgttccaagacaaaggcaagatgccatattggttgtgggaagatagaatgtctctcttgatgggaacgccgtccggggtctcaatgacgatgacgactgtcttgcccacaggcaataggttgttgtccacagtgaagatccgatagaaaacagtggagcctggggtgtagatggtcttgtctgtctggatgaagaggtaaccactctgaaagcttactagcaccgctttctccaccactgttgccccgaagtttgccaccactgtcacgtacttgtgccccttatctgcattgaattccttactggctggaatcttgatggagaccctgttcagatgtccagtggctcctgtcaacactgtcttctcactggtcagcacttgcttctttaggaagtcttgcacagtgacagtgactgggacatcaccctgagcatcatgggcctctagtatgaaagtctcttcactctccagccgcaggacattgggagtaatgatggagtacatggggctccccagagctagcagggagctggccaacagcagcagtagcactagtagctgggaccctgacgtgggtcccatggtaaaggacaaaggtggaaggagtgaggggtaaggggtag

SEQ ID NO: 907 - DNA, 5126 bp, Macaca fascicularis
  source 1..5126: mol_type = genomic DNA
aaagccaactccagcagtcactgctcactcctccccatcctctccctctgtccctctgtccctctgaccctgcactgtcccagcaccatgggactcacctcaggtcccagcctgctgctcctgctactaatccacctccccctggctctggggactcccatgtactctatgatcaccccaaacgtcttgcggctggagagtgaggagaccgtggtgctggaggcccatgacgcgaatggggatgttccggtcactgtcactgtccacgacttcccaggcaaaaaactggtgctgtccagtgagaagaccgtgctgacccctgccaccagccacatgggcagcgtcaccatcaggatcccagccaacaaggagttcaagtcagaaaaggggcacaacaagttcgtgactgtgcaggccaccttcggggcccaagtggtggagaaggtggtactggtcagccttcagagcgggtacctcttcatccagacagacaagaccatctacacccctggctccacagttctctgtcggatcttcaccgtcaaccacaagctgctacccgtgggccggacggtcgtggtcaacattgagaacccggacggcatcccggtcaagcaggactccttgtcttctcagaaccaatttggcatcttgcccttgtcttgggacattccggaactcgtcaacatgggccagtggaagatccgagcctactatgaaaattcgccgcaacaggtcttctccactgagtttgaggtgaaggagtacgtgctgcccagtttcgaggtcatagtggagcctacagagaaattctactacatctataaccagaagggcctggaggtcaccatcaccgccaggttcctctatggaaagaaagtggagggaactgcctttgtcatcttcgggatccaggatggcgagcagaggatttccctgcctgaatccctcaagcgcatccagattgaggatggctcaggagacgccgtgctgagccggaaggtactgctggacggggtgcagaatccccgaccggaagacctagtggggaagtccttgtatgtgtctgtcaccgttatcctgcactcaggcagtgacatggtgcaggcggagcgcagcgggatccccatcgtgacctctccctaccagatccacttcaccaagacgcccaagtacttcaaaccaggaatgccctttgacctcatggtgttcgtgacgaaccccgatggctctccagcctaccgagtccccgtggcagtccagggcgaggacgctgtgcagtctctaacccagggagacggcgtggccaaactcagcatcaacacacaccccagccagaagcccttgagcatcacggtgcgcacgaagaagcgggagctctcggaggcggagcaggctaccaggaccatggaggctcagccctacagcaccgtgggcaactccaacaattacctgcatctctcagtgccacgtgcagagctcagacctggggagaccctcaacgtcaacttcctcctgcgaatggaccgcacccaggaggccaagatccgctactacacctacctgattatgaacaaaggcaagctgttgaaggtgggacgccaggtgcgagagcctggccaggacctggtggtgctgcccctgtccatcaccaccgacttcatcccttccttccgcctggtggcctactacacgctgatcggcgccaacggccagagggaagtggtggccgactccgtgtgggtggacgtcaaggactcttgcgtgggctcgctggtggtaaaaagcggccagtcagaagacaggcagcctttacccgggcagcagatgaccctgaagatagagggtgaccacggggcccgggtgggactggtggctgtggacaagggcgtgtttgtgctgaataagaagaacaagctgacgcagagtaagatctgggacgtggtggagaaggcagacatcggctgcaccccaggcagtgggaaggattacgctggtgtcttctcggatgcaggcctgacctttgcgagcagcagtggccagcagacggcccagagggcagaacttcagtgcccacagccagccgcccgccgacgccgttccgtgcagctcgcggagaagagaatggacaaagttggtcagtaccccaaggagctgcgcaagtgctgcgagcacggtatgcgggagaaccccatgaggttctcatgccagcgccggacccgttacatcaccctggacgaggcgtgcaagaaggccttcctggactgctgcaactacatcaccgagctgcggcggcagcacgcgcgggccagtcacctgggcctggccaggagtaacctggatgaggacatcatcgcagaagagaacatcgtttcccgaagtgagttcccagagagttggctgtggaagattgaagagttgaaagaggcaccgaaaaacggaatctccacgaagctcatgaatatatttttgaaagactccatcaccacgtgggagattctggccgtgagcttgtcagacaagaaagggatctgtgtggcagaccccttcgaggtcacagtaatgcaggacttcttcatcgacctgcggctaccctactctgttgttcgaaacgagcaggtggaaatccgagctgttctctacaattaccggcagaaccaagagctcaaggtgagggtggaactactccacaatccagccttctgcagcctggccaccgccaagaggcgtcaccagcagaccgtaaccatcccccccaagtcctcgctgtccgttccttatgtcatcgtgcccctaaagaccggccagcaggaagtggaagtcaaggctgccgtctaccattttttcatcagtgacggtgtcaggaagtccctgaaggtcgtgccggaaggaatcagaatgaacaaaactgtggctgttcgcacgctggatccagaacgcctgggccaggaaggagtgcagagagaggacgtcccacctgcagacctcagtgaccaagtcccggacaccgagtctgagaccagaattctcctgcaagggaccccggtggcccagatgacagaggatgccatcgatgcggaacggctgaagcacctcatcgtgaccccctcgggctgcggagaacagaacatgatcaccatgacgcccacagtcatcgctgtgcattacctggatgaaacggaacagtgggagaagttcggcccggagaagcggcagggggccttggagctcatcaagaaggggtacacccagcagctggccttcagacaacccagctctgcctttgcggccttcctgaaccgggcacccagcacctggctgaccgcctacgtggtcaaggtcttctctctggctgtcaacctcattgccatcgactcccaggtcctctgcggggctgttaaatggctgatcctggagaagcagaagcccgacggggtcttccaggaggatgcgcccgtgatacatcaagaaatgactggtggattccggaacaccaacgagaaagacatggccctcacggcctttgttctcatctcgctgcaagaggctaaagagatttgcgaggagcaggtcaacagcctgcccggcagcatcactaaagcaggagacttccttgaagccaactacatgaacctacagagatcctacactgtggccatcgctgcctatgccctggcccagatgggcaggctgaagggacctcttctcaacaaatttctgaccacagccaaagataagaaccgctgggaggagcctggtcagcagctctacaatgtggaggccacatcctatgccctcttggccctactgcagctaaaagactttgactttgtgcctcccgtcgtgcgttggctcaatgaacagagatactacggtggtggctatggctctacccaggccaccttcatggtgttccaagccttggctcaataccaaaaggatgtccctgatcacaaggaactgaacctggatgtgtccctccaactgcccagtcgcagctccaagatcatccaccgtatccactgggaatctgccagcctcctgcgatcagaagagaccaaggaaaatgagggtttcacagtcacagctgaaggaaaaggccaaggcaccttgtcggtagtgacaatgtaccatgctaaggccaaaggtcaactcacctgtaataaattcgacctcaaggtcaccataaaaccagcaccggaaacagaaaagaggcctcaggatgccaagaacactatgatccttgagatctgtaccaggtaccggggagaccaggatgccactatgtctatactggacatatccatgatgactggcttcgttccagacacagatgacctcaagcagctggcaaacggcgttgacagatacatctccaagtatgagctggacaaagccttctccgataggaacaccctcatcatctacctggacaaggtctcacactctgaggatgactgtatagctttcaaagttcaccaatattttaatgtagagcttatccagcctggtgcagtcaaggtctacgcctattacaacctggcggaaagctgtacccggttctaccacccagaaaaggaggatggaaagctgaacaagctctgtcgtgatgagctgtgccgctgtgctgaggagaattgcttcatacaaaagttggatgacaaagtcaccctggaagaacggctggacaaggcctgtgagccaggagtggactatgtgtacaagacccgactggtcaaggcccagctgtccaatgactttgacgagtacatcatggccattgagcagatcatcaagtcaggctcggatgaggtgcaggttggacaacagcgcacgttcatcagccccatcaagtgcagggaagccctgaagctggaggagaggaaacactacctcatgtggggtctctcctccgatttctggggagagaaacccaatctcagctacatcatcgggaaggacacctgggtggagcactggcccgaggaggacgaatgccaagatgaagagaaccagaaacaatgccaggacctcggcaccttcactgagaacatggttgtctttgggtgccccaactgaccacacccccattcccccactcccaataaagcttcagttatatttca

SEQ ID NO: 908 - DNA, 5126 bp, Macaca fascicularis
  source 1..5126: mol_type = genomic DNA
tgaaatataactgaagctttattgggagtgggggaatgggggtgtggtcagttggggcacccaaagacaaccatgttctcagtgaaggtgccgaggtcctggcattgtttctggttctcttcatcttggcattcgtcctcctcgggccagtgctccacccaggtgtccttcccgatgatgtagctgagattgggtttctctccccagaaatcggaggagagaccccacatgaggtagtgtttcctctcctccagcttcagggcttccctgcacttgatggggctgatgaacgtgcgctgttgtccaacctgcacctcatccgagcctgacttgatgatctgctcaatggccatgatgtactcgtcaaagtcattggacagctgggccttgaccagtcgggtcttgtacacatagtccactcctggctcacaggccttgtccagccgttcttccagggtgactttgtcatccaacttttgtatgaagcaattctcctcagcacagcggcacagctcatcacgacagagcttgttcagctttccatcctccttttctgggtggtagaaccgggtacagctttccgccaggttgtaataggcgtagaccttgactgcaccaggctggataagctctacattaaaatattggtgaactttgaaagctatacagtcatcctcagagtgtgagaccttgtccaggtagatgatgagggtgttcctatcggagaaggctttgtccagctcatacttggagatgtatctgtcaacgccgtttgccagctgcttgaggtcatctgtgtctggaacgaagccagtcatcatggatatgtccagtatagacatagtggcatcctggtctccccggtacctggtacagatctcaaggatcatagtgttcttggcatcctgaggcctcttttctgtttccggtgctggttttatggtgaccttgaggtcgaatttattacaggtgagttgacctttggccttagcatggtacattgtcactaccgacaaggtgccttggccttttccttcagctgtgactgtgaaaccctcattttccttggtctcttctgatcgcaggaggctggcagattcccagtggatacggtggatgatcttggagctgcgactgggcagttggagggacacatccaggttcagttccttgtgatcagggacatccttttggtattgagccaaggcttggaacaccatgaaggtggcctgggtagagccatagccaccaccgtagtatctctgttcattgagccaacgcacgacgggaggcacaaagtcaaagtcttttagctgcagtagggccaagagggcataggatgtggcctccacattgtagagctgctgaccaggctcctcccagcggttcttatctttggctgtggtcagaaatttgttgagaagaggtcccttcagcctgcccatctgggccagggcataggcagcgatggccacagtgtaggatctctgtaggttcatgtagttggcttcaaggaagtctcctgctttagtgatgctgccgggcaggctgttgacctgctcctcgcaaatctctttagcctcttgcagcgagatgagaacaaaggccgtgagggccatgtctttctcgttggtgttccggaatccaccagtcatttcttgatgtatcacgggcgcatcctcctggaagaccccgtcgggcttctgcttctccaggatcagccatttaacagccccgcagaggacctgggagtcgatggcaatgaggttgacagccagagagaagaccttgaccacgtaggcggtcagccaggtgctgggtgcccggttcaggaaggccgcaaaggcagagctgggttgtctgaaggccagctgctgggtgtaccccttcttgatgagctccaaggccccctgccgcttctccgggccgaacttctcccactgttccgtttcatccaggtaatgcacagcgatgactgtgggcgtcatggtgatcatgttctgttctccgcagcccgagggggtcacgatgaggtgcttcagccgttccgcatcgatggcatcctctgtcatctgggccaccggggtcccttgcaggagaattctggtctcagactcggtgtccgggacttggtcactgaggtctgcaggtgggacgtcctctctctgcactccttcctggcccaggcgttctggatccagcgtgcgaacagccacagttttgttcattctgattccttccggcacgaccttcagggacttcctgacaccgtcactgatgaaaaaatggtagacggcagccttgacttccacttcctgctggccggtctttaggggcacgatgacataaggaacggacagcgaggacttgggggggatggttacggtctgctggtgacgcctcttggcggtggccaggctgcagaaggctggattgtggagtagttccaccctcaccttgagctcttggttctgccggtaattgtagagaacagctcggatttccacctgctcgtttcgaacaacagagtagggtagccgcaggtcgatgaagaagtcctgcattactgtgacctcgaaggggtctgccacacagatccctttcttgtctgacaagctcacggccagaatctcccacgtggtgatggagtctttcaaaaatatattcatgagcttcgtggagattccgtttttcggtgcctctttcaactcttcaatcttccacagccaactctctgggaactcacttcgggaaacgatgttctcttctgcgatgatgtcctcatccaggttactcctggccaggcccaggtgactggcccgcgcgtgctgccgccgcagctcggtgatgtagttgcagcagtccaggaaggccttcttgcacgcctcgtccagggtgatgtaacgggtccggcgctggcatgagaacctcatggggttctcccgcataccgtgctcgcagcacttgcgcagctccttggggtactgaccaactttgtccattctcttctccgcgagctgcacggaacggcgtcggcgggcggctggctgtgggcactgaagttctgccctctgggccgtctgctggccactgctgctcgcaaaggtcaggcctgcatccgagaagacaccagcgtaatccttcccactgcctggggtgcagccgatgtctgccttctccaccacgtcccagatcttactctgcgtcagcttgttcttcttattcagcacaaacacgcccttgtccacagccaccagtcccacccgggccccgtggtcaccctctatcttcagggtcatctgctgcccgggtaaaggctgcctgtcttctgactggccgctttttaccaccagcgagcccacgcaagagtccttgacgtccacccacacggagtcggccaccacttccctctggccgttggcgccgatcagcgtgtagtaggccaccaggcggaaggaagggatgaagtcggtggtgatggacaggggcagcaccaccaggtcctggccaggctctcgcacctggcgtcccaccttcaacagcttgcctttgttcataatcaggtaggtgtagtagcggatcttggcctcctgggtgcggtccattcgcaggaggaagttgacgttgagggtctccccaggtctgagctctgcacgtggcactgagagatgcaggtaattgttggagttgcccacggtgctgtagggctgagcctccatggtcctggtagcctgctccgcctccgagagctcccgcttcttcgtgcgcaccgtgatgctcaagggcttctggctggggtgtgtgttgatgctgagtttggccacgccgtctccctgggttagagactgcacagcgtcctcgccctggactgccacggggactcggtaggctggagagccatcggggttcgtcacgaacaccatgaggtcaaagggcattcctggtttgaagtacttgggcgtcttggtgaagtggatctggtagggagaggtcacgatggggatcccgctgcgctccgcctgcaccatgtcactgcctgagtgcaggataacggtgacagacacatacaaggacttccccactaggtcttccggtcggggattctgcaccccgtccagcagtaccttccggctcagcacggcgtctcctgagccatcctcaatctggatgcgcttgagggattcaggcagggaaatcctctgctcgccatcctggatcccgaagatgacaaaggcagttccctccactttctttccatagaggaacctggcggtgatggtgacctccaggcccttctggttatagatgtagtagaatttctctgtaggctccactatgacctcgaaactgggcagcacgtactccttcacctcaaactcagtggagaagacctgttgcggcgaattttcatagtaggctcggatcttccactggcccatgttgacgagttccggaatgtcccaagacaagggcaagatgccaaattggttctgagaagacaaggagtcctgcttgaccgggatgccgtccgggttctcaatgttgaccacgaccgtccggcccacgggtagcagcttgtggttgacggtgaagatccgacagagaactgtggagccaggggtgtagatggtcttgtctgtctggatgaagaggtacccgctctgaaggctgaccagtaccaccttctccaccacttgggccccgaaggtggcctgcacagtcacgaacttgttgtgccccttttctgacttgaactccttgttggctgggatcctgatggtgacgctgcccatgtggctggtggcaggggtcagcacggtcttctcactggacagcaccagttttttgcctgggaagtcgtggacagtgacagtgaccggaacatccccattcgcgtcatgggcctccagcaccacggtctcctcactctccagccgcaagacgtttggggtgatcatagagtacatgggagtccccagagccagggggaggtggattagtagcaggagcagcaggctgggacctgaggtgagtcccatggtgctgggacagtgcagggtcagagggacagagggacagagggagaggatggggaggagtgagcagtgactgctggagttggcttt

SEQ ID NO: 909 - protein, 16 aa, Artificial Sequence
AAVALLPAVLLALLAP

SEQ ID NO: 910 - protein, 11 aa, Artificial Sequence
AALLPVLLAAP

SEQ ID NO: 911 - protein, 13 aa, HIV
GRKKRRQRRRPPQ

SEQ ID NO: 912 - protein, 16 aa, Drosophila sp.
RQIKIWFQNRRMKWKK

SEQ ID NO: 913 - RNA, 21 nt, Artificial Sequence
  source 1..21: mol_type = other RNA
  modified_base 20: mod_base = OTHER; note = 2`-deoxythimidine-3`-phosphorothioate
  modified_base 21: mod_base = OTHER; note = 2`-deoxythimidine -3`-phosphate
cttacgctgagtacttcgatt

SEQ ID NO: 914 - RNA, 21 nt, Artificial Sequence
  source 1..21: mol_type = other RNA
  modified_base 20: mod_base = OTHER; note = 2`-deoxythimidine-3`-phosphorothioate
  modified_base 21: mod_base = OTHER; note = 2`-deoxythimidine -3`-phosphate
tcgaagtactcagcgtaagtt
